(19) United States
(12) Patent Application Publication
(10) Pub. No.: US 2021/0177920 A1
(43) Pub. Date: Jun. 17, 2021

(54) BACTERIOPHAGE TREATMENT FOR ACNE AND BIOFILMS

(71) Applicants: BIOMX LTD., Ness Ziona (IL); YEDA RESEARCH AND DEVELOPMENT CO. LTD., Rehovot (IL)

(72) Inventors: Eyal Weinstock, Kfar Shmaryahu (IL); Hava Ben-David, Rehovot (IL); Kobi Konstantin Sudakov, Modi'in Makabim-Re'ut (IL); Ayelet Moses, Rishon Le Zion (IL); Sarah Rachel Pollock, Tel Aviv (IL); Rotem Sorek, Rehovot (IL); Naomi Bluma Zak, Jerusalem (IL)

(21) Appl. No.: 16/770,432

(22) PCT Filed: Dec. 4, 2018
(86) PCT No.: PCT/US2018/063842

§ 371 Date: Jun. 5, 2020

Related U.S. Application Data
(60) Provisional application No. 62/594,875, filed on Dec. 5, 2017.

(51) Int. Cl. A61K 35/76; A61K 9/00; A61P 17/10; A61P 31/04; A61K 45/06

(52) U.S. Cl. CPC A61K 35/76; A61K 9/0014; A61K 45/06; A61P 31/04; A61P 17/10

(57) ABSTRACT

Bacteriophage compositions and therapeutic uses thereof. In particular, compositions of lytic bacteriophages that are capable of lysing Propionibacterium acnes (P. acnes) bacterial strains associated with acne and biofilms, thereby treating or preventing acne and biofilms.

[0001] This application claims priority and benefit from U.S. Provisional Patent Application 62/594,875, filed Dec. 5, 2017, the contents and disclosures of which are incorporated herein by reference in their entirety.

### SEQUENCE LISTING

[0002] This instant application contains a Sequence Listing which has been submitted electronically in ASCII format and is hereby incorporated by reference in its entirety. Said ASCII copy, created on Nov. 27, 2018, is named 000110-0001-WO1_SL.txt and is 816,247 bytes in size.

### BACKGROUND OF THE DISCLOSURE

[0003] This application relates to bacteriophage compositions and therapeutic uses thereof. In a particular aspect, the disclosure relates to lytic bacteriophages that are capable of lysing Propionibacterium acnes (P. acnes) bacterial strains. In certain embodiments, the lytic bacteriophages are capable of lysing P. acnes bacterial strains that are generally thought to be associated with acne (e.g., acne vulgaris, acne conglobata, acne fulminans, Hidradenitis suppurative (acne inverse), scalp acne, acne associated with Synovitis, Acne, Pustulosis, Hyperostosis, and Osteitis (SAPHO) syndrome, acne associated with Progressive Macular Hypomelanosis and acne associated with Fatal Bacterial Granuloma after Trauma), thereby treating or preventing the disease. In certain embodiments, the lytic bacteriophages are capable of lysing P. acnes bacterial strains that are associated with biofilms, thereby treating or preventing biofilms.

[0004] Acne is one of the eight most prevalent diseases worldwide, affecting 9.4% of the global population (Tan and Bhate, 2015). In the US, ˜50 million people are suffering from acne, 85% of whom are at the age of 12-25 years. P. acnes is associated with the pathogenesis of acne and is thought to probably be one of the main causes of acne due to its tendency to elicit an immune response. Propionibacterium is one of the main components of human skin microbiota of healthy adults (Human Microbiome Project Consortium, 2012; Hannigan and Grice, 2013). It predominates in sebaceous regions and is estimated to represent nearly 90% of the microbiota (Fitz-Gibbon et al., 2013). The skin of teenagers suffering from acne vulgaris has up to 100-fold higher numbers of P. acnes compared to healthy skin (Leyden et al., 1975). P. acnes causes disease through a number of virulence factors, such as biofilm formation (Achermann et al., 2014). Moreover, P. acnes has also been implicated as the cause of various types of implant-associated infections (Portillo et al., 2013; Fischer et al., 2013; Perry and Lambert, 2011), including breast implants (Del Pozo et al., 2009; Rieger et al., 2009), neurosurgical shunts (Cohen et al., 2008), cardiovascular devices (Delahaye et al., 2005), ocular implants (Deramo and Ting, 2001), internal fracture fixation devices, spinal hardware (Haidar et al., 2010), prosthetic joints (Piper et al., 2009), prosthetic aortic valves, prosthetic hip and shoulder implants (Stirling et al., 2001), cerebrospinal shunts (Deramo and Ting, 2001; Mayhall et al., 1984), dental infections (Delgado et al., 2011; Gribbon et al., 1994; Cove et al., 1983), elbow joint infection (Lyke et al., 2001), endocarditis (native, prosthetic valves) (Schafer et al., 2008; Guio et al., 2009), neurosurgical infections and CNS infections (Perry and Lambert 2011; McDowell et al., 2008), ocular infections (endophthalmitis, microbial keratitis) (Hunyadkurti et al., 2011; Trampuz et al., 2007), postoperative discitis, spondylodiscitis and spinal infections (Del Pozo and Patel 2009; Sampedro et al., 2010; Aucoin et al., 1986; Hoefnagel et al., 2008), prosthetic joint/orthopedic device-related infections (Zeller et al., 2007; Soderquist et al., 2010; Dodson et al., 2010; Piper et al., 2009). P. acnes can act as an opportunistic pathogen by growing as biofilms on these medical devices and other implants, and causing invasive and chronic implant infections (Achermann et al., 2014). The economic burden of implant infections is severe. For example, the annual cost of prosthetic infections in the US is projected to exceed $1.62 billion by 2020 (Kurtz S M et al., 2012).

[0005] Conventional treatment of acne typically involves the prolonged use of antibiotics, most commonly, nadifloxacin, ofloxacin, erythromycin, clindamycin hydrochloride, doxycycline, tetracycline hydrochloride, minocycline, ampicillin, cephalexin, gentamycin, and trimethoprim-sulfamethoxazole (Jończyk-Matysiak, E, et al., 2017; Nishijima et al., 1996; Michalek et al., 2015). Prolonged antibiotic therapy in acne has led to antibiotic resistance of P. acnes strains (Sardana et al., 2016; Walsh et al., 2016) and has also been associated with the disturbance in natural microbiota of the skin and the risk of colonization of strains such as Streptococcus pyogenes (Levy et al., 2003). Experts have cautioned against excessive use of antibiotics and encourage the development of alternatives to topical antibiotic treatment for acne (Dréno, 2016). Moreover, implant-associated infections require the surgical removal of the infected implant and extensive and aggressive debridement of infected tissue, followed by prolonged antibiotic treatment, which can also lead to antibiotic resistance (Achermann et al., 2014). Hence, there is a significant unmet need for effective, reliable, and long-term treatment and/or prevention of acne and implant-associated P. acnes infections and compounds and compositions that can affect such treatment and/or prevention.

[0006] Bacteriophages are bacterial viruses that naturally control microbial populations. They are commonly found in the biosphere and therefore are environmentally friendly, because they are natural structures based on natural selection (Golkar et al., 2014). They are specific to their bacterial host and multiply at the site of infection where there are sensitive bacteria. Moreover, they have proved to be safe and well tolerated, with few side-effects or toxic effects (Jończyk-Matysiak, E, et al. (2017).

[0007] Despite the existence of antibiotic treatments for acne, it is desirable to provide alternate treatments that avoid some of the side effects of antibiotic treatment.

### SUMMARY OF THE DISCLOSURE OF THE APPLICATION

[0008] The present application provides bacteriophage compositions and therapeutic uses thereof. In specific embodiments, the application provides lytic bacteriophages that are capable of lysing one or more P. acnes, strains, or substrains, such as P. acnes B9 strain (“B9” herein) or as P. acnes PA4 strain (“PA4” herein), or P. acnes PA3 strain (“PA3” herein), or P. acnes PA5 strain (“PA5” herein), each of which are generally thought to be associated with acne. The disclosure provides methods for treating or preventing acne on skin, preventing P. acnes biofilm development on skin and implants, or preventing implant-associated P. acnes infection. The disclosure also provides methods of selecting patients that are responsive to treatment by the methods set forth herein and patients to be treated with the methods provided herein.

[0009] As described herein the present disclosure relates to the discovery that certain bacteriophage can target and lyse the P. acnes bacteria. Accordingly, the present disclosure provides bacteriophage compositions for treating or preventing conditions associated with P. acnes colonization in/on skin, eyes, teeth and implants. The application also provides compositions comprising such bacteriophage and methods of using these compositions.

[0010] In certain aspects, the application provides a composition comprising (a) a first bacteriophage that infects and lyses at least one P. acnes strain selected from B9, PA4, PA3, and PA5; (b) a second bacteriophage that infects and lyses at least one P. acnes strain selected from B9, PA4, PA3, and PA5 that is not infected and lysed by the first bacteriophage; and (c) a pharmaceutically or cosmetically acceptable adjuvant, carrier or vehicle.

[0011] In certain aspects, the application provides a composition comprising (a) a first bacteriophage that infects and lyses at least one P. acnes strain selected from B9, PA4, PA3, and PA5; (b) a second bacteriophage that infects and lyses at least one P. acnes strain selected from B9, PA4, PA3, and PA5; (c) a third bacteriophage that infects and lyses at least one P. acnes strain selected from B9, PA4, PA3, and PA5; and (d) a pharmaceutically or cosmetically acceptable adjuvant, carrier or vehicle; wherein at least one P. acnes strain infected by the second bacteriophage is not infected and lysed by at least one of the first bacteriophage and the third bacteriophage, and wherein at least one P. acnes strain infected by the third bacteriophage is not infected and lysed by at least one of the first bacteriophage and the second bacteriophage.

[0012] In some embodiments, the composition comprises at least two, at least three, or least four or more bacteriophages selected from PS7-1, NS19-1, NS13, PA1-13, PA1-4, NS7-1, PA1-9, PA1-11, PA1-12, PA1-13, PA1-14, PA2-7, PAP-1, PAP-4, PAP-12, PAP-13, PAP-14, PA1-4, and PA2-13.

[0013] In some aspects of these embodiments, the composition comprises at least the following two bacteriophages: NS13 and NS7-1; NS13 and PA1-11; NS13 and PA1-12; NS13 and PA1-13; NS13 and PA1-14; NS13 and PA1-4; NS13 and PA1-9; NS13 and PA2-13; NS13 and PA2-7; NS13 and PAP-1; NS13 and PAP-12; NS13 and PAP-13; NS13 and PAP-14; NS13 and PAP-4; NS19-1 and NS7-1; NS19-1 and PA1-11; NS19-1 and PA1-12; NS19-1 and PA1-13; NS19-1 and PA1-14; NS19-1 and PA1-4; NS19-1 and PA1-9; NS19-1 and PA2-13; NS19-1 and PA2-7; NS19-1 and PAP-1; NS19-1 and PAP-12; NS19-1 and PAP-13; NS19-1 and PAP-14; NS19-1 and PAP-4; NS7-1 and PA1-11; NS7-1 and PA1-12; NS7-1 and PA1-13; NS7-1 and PA1-4; NS7-1 and PA1-9; NS7-1 and PA2-13; NS7-1 and PAP-12; PA1-11 and PA1-12; PA1-11 and PA1-13; PA1-11 and PA2-13; PA1-11 and PAP-12; PA1-12 and PA1-13; PA1-12 and PA2-13; PA1-12 and PAP-12; PA1-13 and PA1-14; PA1-13 and PA1-4; PA1-13 and PA1-9; PA1-13 and PA2-13; PA1-13 and PA2-7; PA1-13 and PAP-1; PA1-13 and PAP-12; PA1-13 and PAP-13; PA1-13 and PAP-14; PA1-13 and PAP-4; PA1-14 and PA1-11; PA1-14 and PA1-12; PA1-14 and PA1-9; PA1-14 and PA2-13; PA1-14 and PAP-12; PA1-4 and PA1-11; PA1-4 and PA1-12; PA1-4 and PA1-14; PA1-4 and PA1-9; PA1-4 and PA2-13; PA1-4 and PA2-7; PA1-4 and PAP-1; PA1-4 and PAP-12; PA1-4 and PAP-13; PA1-4 and PAP-14; PA1-4 and PAP-4; PA1-9 and PA1-11; PA1-9 and PA1-12; PA1-9 and PA2-13; PA1-9 and PAP-12; PA2-7 and PA1-11; PA2-7 and PA1-12; PA2-7 and PA1-9; PA2-7 and PA2-13; PA2-7 and PAP-12; PAP-1 and PA1-11; PAP-1 and PA1-12; PAP-1 and PA1-9; PAP-1 and PA2-13; PAP-1 and PAP-12; PAP-12 and PA2-13; PAP-4 and PA1-11; PAP-4 and PA1-12; PAP-4 and PA1-9; PAP-4 and PA2-13; PS7-1 and NS7-1; PS7-1 and PA1-11; PS7-1 and PA1-12; PS7-1 and PA1-13; PS7-1 and PA1-14; PS7-1 and PA1-4; PS7-1 and PA1-9; PS7-1 and PA2-13; PS7-1 and PA2-7; PS7-1 and PAP-1; PS7-1 and PAP-12; PS7-1 and PAP-13; PS7-1 and PAP-14; or PS7-1 and PAP-4.

[0014] In some embodiments, the composition comprises at least the following three bacteriophages: NS13, NS7-1, and PA1-11; NS13, NS7-1, and PA1-12; NS13, NS7-1, and PA1-13; NS13, NS7-1, and PA1-4; NS13, NS7-1, and PA1-9; NS13, NS7-1, and PA2-13; NS13, NS7-1, and PAP-12; NS13, PA1-11, and PA1-12; NS13, PA1-11, and PA1-13; NS13, PA1-11, and PA1-14; NS13, PA1-11, and PA1-4; NS13, PA1-11, and PA1-9; NS13, PA1-11, and PA2-13; NS13, PA1-11, and PA2-7; NS13, PA1-11, and PAP-1; NS13, PA1-11, and PAP-12; NS13, PA1-11, and PAP-13; NS13, PA1-11, and PAP-14; NS13, PA1-11, and PAP-4; NS13, PA1-12, and PA1-13; NS13, PA1-12, and PA1-14; NS13, PA1-12, and PA1-4; NS13, PA1-12, and PA1-9; NS13, PA1-12, and PA2-13; NS13, PA1-12, and PA2-7; NS13, PA1-12, and PAP-1; NS13, PA1-12, and PAP-12; NS13, PA1-12, and PAP-13; NS13, PA1-12, and PAP-14; NS13, PA1-12, and PAP-4; NS13, PA1-13, and PA1-14; NS13, PA1-13, and PA1-4; NS13, PA1-13, and PA1-9; NS13, PA1-13, and PA2-13; NS13, PA1-13, and PA2-7; NS13, PA1-13, and PAP-1; NS13, PA1-13, and PAP-12; NS13, PA1-13, and PAP-13; NS13, PA1-13, and PAP-14; NS13, PA1-13, and PAP-4; NS13, PA1-14, and PA1-4; NS13, PA1-14, and PA1-9; NS13, PA1-14, and PA2-13; NS13, PA1-14, and PAP-12; NS13, PA1-4, and PA1-9; NS13, PA1-4, and PA2-13; NS13, PA1-4, and PA2-7; NS13, PA1-4, and PAP-1; NS13, PA1-4, and PAP-12; NS13, PA1-4, and PAP-13; NS13, PA1-4, and PAP-14; NS13, PA1-4, and PAP-4; NS13, PA1-9, and PA2-13; NS13, PA1-9, and PA2-7; NS13, PA1-9, and PAP-1; NS13, PA1-9, and PAP-12; NS13, PA1-9, and PAP-13; NS13, PA1-9, and PAP-14; NS13, PA1-9, and PAP-4; NS13, PA2-13, and PA2-7; NS13, PA2-13, and PAP-1; NS13, PA2-13, and PAP-12; NS13, PA2-13, and PAP-13; NS13, PA2-13, and PAP-14; NS13, PA2-13, and PAP-4; NS13, PA2-7, and PAP-12; NS13, PAP-1, and PAP-12; NS13, PAP-12, and PAP-13; NS13, PAP-12, and PAP-14; NS13, PAP-12, and PAP-4; NS19-1, NS7-1, and PA1-11; NS19-1, NS7-1, and PA1-12; NS19-1, NS7-1, and PA1-13; NS19-1, NS7-1, and PA1-4; NS19-1, NS7-1, and PA1-9; NS19-1, NS7-1, and PA2-13; NS19-1, NS7-1, and PAP-12; NS19-1, PA1-11, and PA1-12; NS19-1, PA1-11, and PA1-13; NS19-1, PA1-11, and PA1-14; NS19-1, PA1-11, and PA1-4; NS19-1, PA1-11, and PA1-9; NS19-1, PA1-11, and PA2-13; NS19-1, PA1-11, and PA2-7; NS19-1, PA1-11, and PAP-1; NS19-1, PA1-11, and PAP-12; NS19-1, PA1-11, and PAP-13; NS19-1, PA1-11, and PAP-14; NS19-1, PA1-11, and PAP-4; NS19-1, PA1-12, and PA1-13; NS19-1, PA1-12, and PA1-14; NS19-1, PA1-12, and PA1-4; NS19-1, PA1-12, and PA1-9; NS19-1, PA1-12, and PA2-13; NS19-1, PA1-12, and PA2-7; NS19-1, PA1-12, and PAP-1; NS19-1, PA1-12, and PAP-12; NS19-1, PA1-12, and PAP-13; NS19-1, PA1-12, and PAP-14; NS19-1, PA1-12, and PAP-4; NS19-1, PA1-13, and PA1-14; NS19-1, PA1-13, and PA1-4; NS19-1, PA1-13, and PA1-9; NS19-1, PA1-13, and PA2-13; NS19-1, PA1-13, and PA2-7; NS19-1, PA1-13, and PAP-1; NS19-1, PA1-13, and PAP-12; NS19-1, PA1-13, and PAP-13; NS19-1, PA1-13, and PAP-14; NS19-1, PA1-13, and PAP-4; NS19-1, PA1-14, and PA1-4; NS19-1, PA1-14, and PA1-9; NS19-1, PA1-14, and PA2-13; NS19-1, PA1-14, and PAP-12; NS19-1, PA1-4, and PA1-9; NS19-1, PA1-4, and PA2-13; NS19-1, PA1-4, and PA2-7; NS19-1, PA1-4, and PAP-1; NS19-1, PA1-4, and PAP-12; NS19-1, PA1-4, and PAP-13; NS19-1, PA1-4, and PAP-14; NS19-1, PA1-4, and PAP-4; NS19-1, PA1-9, and PA2-13; NS19-1, PA1-9, and PA2-7; NS19-1, PA1-9, and PAP-1; NS19-1, PA1-9, and PAP-12; NS19-1, PA1-9, and PAP-13; NS19-1, PA1-9, and PAP-14; NS19-1, PA1-9, and PAP-4; NS19-1, PA2-13, and PA2-7; NS19-1, PA2-13, and PAP-1; NS19-1, PA2-13, and PAP-12; NS19-1, PA2-13, and PAP-13; NS19-1, PA2-13, and PAP-14; NS19-1, PA2-13, and PAP-4; NS19-1, PA2-7, and PAP-12; NS19-1, PAP-1, and PAP-12; NS19-1, PAP-12, and PAP-13; NS19-1, PAP-12, and PAP-14; NS19-1, PAP-12, and PAP-4; NS7-1, PA1-11, and PA1-13; NS7-1, PA1-11, and PA1-4; NS7-1, PA1-11, and PAP-12; NS7-1, PA1-11, and PS7-1; NS7-1, PA1-12, and PA1-13; NS7-1, PA1-12, and PA1-4; NS7-1, PA1-12, and PAP-12; NS7-1, PA1-12, and PS7-1; NS7-1, PA1-13, and PA1-4; NS7-1, PA1-13, and PA1-9; NS7-1, PA1-13, and PA2-13; NS7-1, PA1-13, and PAP-12; NS7-1, PA1-13, and PS7-1; NS7-1, PA1-4, and PA1-9; NS7-1, PA1-4, and PA2-13; NS7-1, PA1-4, and PAP-12; NS7-1, PA1-4, and PS7-1; NS7-1, PA1-9, and PAP-12; NS7-1, PA1-9, and PS7-1; NS7-1, PA2-13, and PAP-12; NS7-1, PA2-13, and PS7-1; NS7-1, PAP-12, and PS7-1; PA1-11, PA1-12, and PA1-13; PA1-11, PA1-12, and PA1-4; PA1-11, PA1-12, and PAP-12; PA1-11, PA1-12, and PS7-1; PA1-11, PA1-13, and PA1-14; PA1-11, PA1-13, and PA1-4; PA1-11, PA1-13, and PA1-9; PA1-11, PA1-13, and PA2-13; PA1-11, PA1-13, and PA2-7; PA1-11, PA1-13, and PAP-1; PA1-11, PA1-13, and PAP-12; PA1-11, PA1-13, and PAP-13; PA1-11, PA1-13, and PAP-14; PA1-11, PA1-13, and PAP-4; PA1-11, PA1-13, and PS7-1; PA1-11, PA1-14, and PA1-4; PA1-11, PA1-14, and PS7-1; PA1-11, PA1-4, and PA1-9; PA1-11, PA1-4, and PA2-13; PA1-11, PA1-4, and PA2-7; PA1-11, PA1-4, and PAP-1; PA1-11, PA1-4, and PAP-12; PA1-11, PA1-4, and PAP-13; PA1-11, PA1-4, and PAP-14; PA1-11, PA1-4, and PAP-4; PA1-11, PA1-4, and PS7-1; PA1-11, PA1-9, and PAP-12; PA1-11, PA1-9, and PS7-1; PA1-11, PA2-13, and PAP-12; PA1-11, PA2-13, and PS7-1; PA1-11, PA2-7, and PAP-12; PA1-11, PA2-7, and PS7-1; PA1-11, PAP-1, and PAP-12; PA1-11, PAP-1, and PS7-1; PA1-11, PAP-12, and PAP-13; PA1-11, PAP-12, and PAP-14; PA1-11, PAP-12, and PAP-4; PA1-11, PAP-12, and PS7-1; PA1-11, PAP-13, and PS7-1; PA1-11, PAP-14, and PS7-1; PA1-11, PAP-4, and PS7-1; PA1-12, PA1-13, and PA1-14; PA1-12, PA1-13, and PA1-4; PA1-12, PA1-13, and PA1-9; PA1-12, PA1-13, and PA2-13; PA1-12, PA1-13, and PA2-7; PA1-12, PA1-13, and PAP-1; PA1-12, PA1-13, and PAP-12; PA1-12, PA1-13, and PAP-13; PA1-12, PA1-13, and PAP-14; PA1-12, PA1-13, and PAP-4; PA1-12, PA1-13, and PS7-1; PA1-12, PA1-14, and PA1-4; PA1-12, PA1-14, and PAP-12; PA1-12, PA1-14, and PS7-1; PA1-12, PA1-4, and PA1-9; PA1-12, PA1-4, and PA2-13; PA1-12, PA1-4, and PA2-7; PA1-12, PA1-4, and PAP-1; PA1-12, PA1-4, and PAP-12; PA1-12, PA1-4, and PAP-13; PA1-12, PA1-4, and PAP-14; PA1-12, PA1-4, and PAP-4; PA1-12, PA1-4, and PS7-1; PA1-12, PA1-9, and PAP-12; PA1-12, PA1-9, and PS7-1; PA1-12, PA2-13, and PAP-12; PA1-12, PA2-13, and PS7-1; PA1-12, PA2-7, and PAP-12; PA1-12, PA2-7, and PS7-1; PA1-12, PAP-1, and PAP-12; PA1-12, PAP-1, and PS7-1; PA1-12, PAP-12, and PAP-13; PA1-12, PAP-12, and PAP-14; PA1-12, PAP-12, and PAP-4; PA1-12, PAP-12, and PS7-1; PA1-12, PAP-13, and PS7-1; PA1-12, PAP-14, and PS7-1; PA1-12, PAP-4, and PS7-1; PA1-13, PA1-14, and PA1-4; PA1-13, PA1-14, and PA1-9; PA1-13, PA1-14, and PA2-13; PA1-13, PA1-14, and PAP-12; PA1-13, PA1-14, and PS7-1; PA1-13, PA1-4, and PA1-9; PA1-13, PA1-4, and PA2-13; PA1-13, PA1-4, and PA2-7; PA1-13, PA1-4, and PAP-1; PA1-13, PA1-4, and PAP-12; PA1-13, PA1-4, and PAP-13; PA1-13, PA1-4, and PAP-14; PA1-13, PA1-4, and PAP-4; PA1-13, PA1-4, and PS7-1; PA1-13, PA1-9, and PA2-13; PA1-13, PA1-9, and PA2-7; PA1-13, PA1-9, and PAP-1; PA1-13, PA1-9, and PAP-12; PA1-13, PA1-9, and PAP-13; PA1-13, PA1-9, and PAP-14; PA1-13, PA1-9, and PAP-4; PA1-13, PA1-9, and PS7-1; PA1-13, PA2-13, and PA2-7; PA1-13, PA2-13, and PAP-1; PA1-13, PA2-13, and PAP-12; PA1-13, PA2-13, and PAP-13; PA1-13, PA2-13, and PAP-14; PA1-13, PA2-13, and PAP-4; PA1-13, PA2-13, and PS7-1; PA1-13, PA2-7, and PAP-12; PA1-13, PA2-7, and PS7-1; PA1-13, PAP-1, and PAP-12; PA1-13, PAP-1, and PS7-1; PA1-13, PAP-12, and PAP-13; PA1-13, PAP-12, and PAP-14; PA1-13, PAP-12, and PAP-4; PA1-13, PAP-12, and PS7-1; PA1-13, PAP-13, and PS7-1; PA1-13, PAP-14, and PS7-1; PA1-13, PAP-4, and PS7-1; PA1-14, PA1-4, and PA1-9; PA1-14, PA1-4, and PA2-13; PA1-14, PA1-4, and PAP-12; PA1-14, PA1-4, and PS7-1; PA1-14, PA1-9, and PAP-12; PA1-14, PA1-9, and PS7-1; PA1-14, PA2-13, and PAP-12; PA1-14, PA2-13, and PS7-1; PA1-14, PAP-12, and PS7-1; PA1-4, PA1-9, and PA2-13; PA1-4, PA1-9, and PA2-7; PA1-4, PA1-9, and PAP-1; PA1-4, PA1-9, and PAP-12; PA1-4, PA1-9, and PAP-13; PA1-4, PA1-9, and PAP-14; PA1-4, PA1-9, and PAP-4; PA1-4, PA1-9, and PS7-1; PA1-4, PA2-13, and PA2-7; PA1-4, PA2-13, and PAP-1; PA1-4, PA2-13, and PAP-12; PA1-4, PA2-13, and PAP-13; PA1-4, PA2-13, and PAP-14; PA1-4, PA2-13, and PAP-4; PA1-4, PA2-13, and PS7-1; PA1-4, PA2-7, and PAP-12; PA1-4, PA2-7, and PS7-1; PA1-4, PAP-1, and PAP-12; PA1-4, PAP-1, and PS7-1; PA1-4, PAP-12, and PAP-13; PA1-4, PAP-12, and PAP-14; PA1-4, PAP-12, and PAP-4; PA1-4, PAP-12, and PS7-1; PA1-4, PAP-13, and PS7-1; PA1-4, PAP-14, and PS7-1; PA1-4, PAP-4, and PS7-1; PA1-9, PA2-13, and PAP-12; PA1-9, PA2-13, and PS7-1; PA1-9, PA2-7, and PAP-12; PA1-9, PA2-7, and PS7-1; PA1-9, PAP-1, and PAP-12; PA1-9, PAP-1, and PS7-1; PA1-9, PAP-12, and PAP-13; PA1-9, PAP-12, and PAP-14; PA1-9, PAP-12, and PAP-4; PA1-9, PAP-12, and PS7-1; PA1-9, PAP-13, and PS7-1; PA1-9, PAP-14, and PS7-1; PA1-9, PAP-4, and PS7-1; PA2-13, PA2-7, and PAP-12; PA2-13, PA2-7, and PS7-1; PA2-13, PAP-1, and PAP-12; PA2-13, PAP-1, and PS7-1; PA2-13, PAP-12, and PAP-13; PA2-13, PAP-12, and PAP-14; PA2-13, PAP-12, and PAP-4; PA2-13, PAP-12, and PS7-1; PA2-13, PAP-13, and PS7-1; PA2-13, PAP-14, and PS7-1; PA2-13, PAP-4, and PS7-1; PA2-7, PAP-12, and PS7-1; PAP-1, PAP-12, and PS7-1; PAP-12, PAP-13, and PS7-1; PAP-12, PAP-14, and PS7-1; or PAP-12, PAP-4, and PS7-1.

[0015] In some embodiments, the composition comprises at least the following four bacteriophages: NS13, NS7-1, PA1-11, and PA1-4; NS13, NS7-1, PA1-11, and PAP-12; NS13, NS7-1, PA1-12, and PA1-4; NS13, NS7-1, PA1-12, and PAP-12; NS13, NS7-1, PA1-13, and PA1-4; NS13, NS7-1, PA1-13, and PAP-12; NS13, NS7-1, PA1-4, and PA1-9; NS13, NS7-1, PA1-4, and PA2-13; NS13, NS7-1, PA1-4, and PS7-1; NS13, NS7-1, PA1-9, and PAP-12; NS13, NS7-1, PA2-13, and PAP-12; NS13, PA1-11, PA1-12, and PA1-4; NS13, PA1-11, PA1-12, and PAP-12; NS13, PA1-11, PA1-13, and PA1-4; NS13, PA1-11, PA1-13, and PAP-12; NS13, PA1-11, PA1-14, and PA1-4; NS13, PA1-11, PA1-14, and PAP-12; NS13, PA1-11, PA1-4, and PA1-9; NS13, PA1-11, PA1-4, and PA2-13; NS13, PA1-11, PA1-4, and PA2-7; NS13, PA1-11, PA1-4, and PAP-12; NS13, PA1-11, PA1-4, and PAP-13; NS13, PA1-11, PA1-4, and PAP-14; NS13, PA1-11, PA1-4, and PAP-4; NS13, PA1-11, PA1-4, and PS7-1; NS13, PA1-11, PA1-9, and PAP-12; NS13, PA1-11, PA2-13, and PAP-12; NS13, PA1-11, PA2-7, and PAP-12; NS13, PA1-11, PAP-12, and PAP-13; NS13, PA1-11, PAP-12, and PAP-14; NS13, PA1-11, PAP-12, and PAP-4; NS13, PA1-11, PAP-12, and PS7-1; NS13, PA1-12, PA1-13, and PA1-4; NS13, PA1-12, PA1-13, and PAP-12; NS13, PA1-12, PA1-14, and PA1-4; NS13, PA1-12, PA1-14, and PAP-12; NS13, PA1-12, PA1-4, and PA1-9; NS13, PA1-12, PA1-4, and PA2-13; NS13, PA1-12, PA1-4, and PA2-7; NS13, PA1-12, PA1-4, and PAP-12; NS13, PA1-12, PA1-4, and PAP-13; NS13, PA1-12, PA1-4, and PAP-14; NS13, PA1-12, PA1-4, and PAP-4; NS13, PA1-12, PA1-4, and PS7-1; NS13, PA1-12, PA1-9, and PAP-12; NS13, PA1-12, PA2-13, and PAP-12; NS13, PA1-12, PA2-7, and PAP-12; NS13, PA1-12, PAP-12, and PAP-13; NS13, PA1-12, PAP-12, and PAP-14; NS13, PA1-12, PAP-12, and PAP-4; NS13, PA1-12, PAP-12, and PS7-1; NS13, PA1-13, PA1-14, and PA1-4; NS13, PA1-13, PA1-14, and PAP-12; NS13, PA1-13, PA1-4, and PA1-9; NS13, PA1-13, PA1-4, and PA2-13; NS13, PA1-13, PA1-4, and PA2-7; NS13, PA1-13, PA1-4, and PAP-12; NS13, PA1-13, PA1-4, and PAP-13; NS13, PA1-13, PA1-4, and PAP-14; NS13, PA1-13, PA1-4, and PAP-4; NS13, PA1-13, PA1-4, and PS7-1; NS13, PA1-13, PA1-9, and PAP-12; NS13, PA1-13, PA2-13, and PAP-12; NS13, PA1-13, PA2-7, and PAP-12; NS13, PA1-13, PAP-12, and PAP-13; NS13, PA1-13, PAP-12, and PAP-14; NS13, PA1-13, PAP-12, and PAP-4; NS13, PA1-13, PAP-12, and PS7-1; NS13, PA1-14, PA1-4, and PA1-9; NS13, PA1-14, PA1-4, and PA2-13; NS13, PA1-14, PA1-4, and PS7-1; NS13, PA1-14, PA1-9, and PAP-12; NS13, PA1-14, PA2-13, and PAP-12; NS13, PA1-14, PAP-12, and PS7-1; NS13, PA1-4, PA1-9, and PA2-13; NS13, PA1-4, PA1-9, and PA2-7; NS13, PA1-4, PA1-9, and PAP-12; NS13, PA1-4, PA1-9, and PAP-13; NS13, PA1-4, PA1-9, and PAP-14; NS13, PA1-4, PA1-9, and PAP-4; NS13, PA1-4, PA1-9, and PS7-1; NS13, PA1-4, PA2-13, and PA2-7; NS13, PA1-4, PA2-13, and PAP-12; NS13, PA1-4, PA2-13, and PAP-13; NS13, PA1-4, PA2-13, and PAP-14; NS13, PA1-4, PA2-13, and PAP-4; NS13, PA1-4, PA2-7, and PS7-1; NS13, PA1-4, PAP-12, and PS7-1; NS13, PA1-4, PAP-13, and PS7-1; NS13, PA1-4, PAP-14, and PS7-1; NS13, PA1-4, PAP-4, and PS7-1; NS13, PA1-9, PA2-13, and PAP-12; NS13, PA1-9, PA2-7, and PAP-12; NS13, PA1-9, PAP-12, and PAP-13; NS13, PA1-9, PAP-12, and PAP-14; NS13, PA1-9, PAP-12, and PAP-4; NS13, PA1-9, PAP-12, and PS7-1; NS13, PA2-13, PA2-7, and PAP-12; NS13, PA2-13, PAP-12, and PAP-13; NS13, PA2-13, PAP-12, and PAP-14; NS13, PA2-13, PAP-12, and PAP-4; NS13, PA2-7, PAP-12, and PS7-1; NS13, PAP-12, PAP-13, and PS7-1; NS13, PAP-12, PAP-14, and PS7-1; NS13, PAP-12, PAP-4, and PS7-1; NS19-1, NS7-1, PA1-11, and PA1-4; NS19-1, NS7-1, PA1-11, and PAP-12; NS19-1, NS7-1, PA1-12, and PA1-4; NS19-1, NS7-1, PA1-12, and PAP-12; NS19-1, NS7-1, PA1-13, and PA1-4; NS19-1, NS7-1, PA1-13, and PAP-12; NS19-1, NS7-1, PA1-4, and PA1-9; NS19-1, NS7-1, PA1-4, and PA2-13; NS19-1, NS7-1, PA1-4, and PS7-1; NS19-1, NS7-1, PA1-9, and PAP-12; NS19-1, NS7-1, PA2-13, and PAP-12; NS19-1, NS7-1, PAP-12, and PS7-1; NS19-1, PA1-11, PA1-12, and PA1-4; NS19-1, PA1-11, PA1-12, and PAP-12; NS19-1, PA1-11, PA1-13, and PA1-4; NS19-1, PA1-11, PA1-13, and PAP-12; NS19-1, PA1-11, PA1-14, and PA1-4; NS19-1, PA1-11, PA1-14, and PAP-12; NS19-1, PA1-11, PA1-4, and PA1-9; NS19-1, PA1-11, PA1-4, and PA2-13; NS19-1, PA1-11, PA1-4, and PA2-7; NS19-1, PA1-11, PA1-4, and PAP-12; NS19-1, PA1-11, PA1-4, and PAP-13; NS19-1, PA1-11, PA1-4, and PAP-14; NS19-1, PA1-11, PA1-4, and PAP-4; NS19-1, PA1-11, PA1-4, and PS7-1; NS19-1, PA1-11, PA1-9, and PAP-12; NS19-1, PA1-11, PA2-13, and PAP-12; NS19-1, PA1-11, PA2-7, and PAP-12; NS19-1, PA1-11, PAP-12, and PAP-13; NS19-1, PA1-11, PAP-12, and PAP-14; NS19-1, PA1-11, PAP-12, and PAP-4; NS19-1, PA1-11, PAP-12, and PS7-1; NS19-1, PA1-12, PA1-13, and PA1-4; NS19-1, PA1-12, PA1-13, and PAP-12; NS19-1, PA1-12, PA1-14, and PA1-4; NS19-1, PA1-12, PA1-14, and PAP-12; NS19-1, PA1-12, PA1-4, and PA1-9; NS19-1, PA1-12, PA1-4, and PA2-13; NS19-1, PA1-12, PA1-4, and PA2-7; NS19-1, PA1-12, PA1-4, and PAP-12; NS19-1, PA1-12, PA1-4, and PAP-13; NS19-1, PA1-12, PA1-4, and PAP-14; NS19-1, PA1-12, PA1-4, and PAP-4; NS19-1, PA1-12, PA1-4, and PS7-1; NS19-1, PA1-12, PA1-9, and PAP-12; NS19-1, PA1-12, PA2-13, and PAP-12; NS19-1, PA1-12, PA2-7, and PAP-12; NS19-1, PA1-12, PAP-12, and PAP-13; NS19-1, PA1-12, PAP-12, and PAP-14; NS19-1, PA1-12, PAP-12, and PAP-4; NS19-1, PA1-12, PAP-12, and PS7-1; NS19-1, PA1-13, PA1-14, and PA1-4; NS19-1, PA1-13, PA1-14, and PAP-12; NS19-1, PA1-13, PA1-4, and PA1-9; NS19-1, PA1-13, PA1-4, and PA2-13; NS19-1, PA1-13, PA1-4, and PA2-7; NS19-1, PA1-13, PA1-4, and PAP-12; NS19-1, PA1-13, PA1-4, and PAP-13; NS19-1, PA1-13, PA1-4, and PAP-14; NS19-1, PA1-13, PA1-4, and PAP-4; NS19-1, PA1-13, PA1-4, and PS7-1; NS19-1, PA1-13, PA1-9, and PAP-12; NS19-1, PA1-13, PA2-13, and PAP-12; NS19-1, PA1-13, PA2-7, and PAP-12; NS19-1, PA1-13, PAP-12, and PAP-13; NS19-1, PA1-13, PAP-12, and PAP-14; NS19-1, PA1-13, PAP-12, and PAP-4; NS19-1, PA1-13, PAP-12, and PS7-1; NS19-1, PA1-14, PA1-4, and PA1-9; NS19-1, PA1-14, PA1-4, and PA2-13; NS19-1, PA1-14, PA1-4, and PS7-1; NS19-1, PA1-14, PA1-9, and PAP-12; NS19-1, PA1-14, PA2-13, and PAP-12; NS19-1, PA1-14, PAP-12, and PS7-1; NS19-1, PA1-4, PA1-9, and PA2-13; NS19-1, PA1-4, PA1-9, and PA2-7; NS19-1, PA1-4, PA1-9, and PAP-12; NS19-1, PA1-4, PA1-9, and PAP-13; NS19-1, PA1-4, PA1-9, and PAP-14; NS19-1, PA1-4, PA1-9, and PAP-4; NS19-1, PA1-4, PA1-9, and PS7-1; NS19-1, PA1-4, PA2-13, and PA2-7; NS19-1, PA1-4, PA2-13, and PAP-12; NS19-1, PA1-4, PA2-13, and PAP-13; NS19-1, PA1-4, PA2-13, and PAP-14; NS19-1, PA1-4, PA2-13, and PAP-4; NS19-1, PA1-4, PA2-7, and PS7-1; NS19-1, PA1-4, PAP-12, and PS7-1; NS19-1, PA1-4, PAP-13, and PS7-1; NS19-1, PA1-4, PAP-14, and PS7-1; NS19-1, PA1-4, PAP-4, and PS7-1; NS19-1, PA1-9, PA2-13, and PAP-12; NS19-1, PA1-9, PA2-7, and PAP-12; NS19-1, PA1-9, PAP-12, and PAP-13; NS19-1, PA1-9, PAP-12, and PAP-14; NS19-1, PA1-9, PAP-12, and PAP-4; NS19-1, PA1-9, PAP-12, and PS7-1; NS19-1, PA2-13, PA2-7, and PAP-12; NS19-1, PA2-13, PAP-12, and PAP-13; NS19-1, PA2-13, PAP-12, and PAP-14; NS19-1, PA2-13, PAP-12, and PAP-4; NS19-1, PA2-7, PAP-12, and PS7-1; NS19-1, PAP-12, PAP-13, and PS7-1; NS19-1, PAP-12, PAP-14, and PS7-1; NS19-1, PAP-12, PAP-4, and PS7-1; NS7-1, PA1-11, PA1-13, and PA1-4; NS7-1, PA1-11, PA1-13, and PAP-12; NS7-1, PA1-11, PA1-4, and PAP-12; NS7-1, PA1-11, PA1-4, and PS7-1; NS7-1, PA1-11, PAP-12, and PS7-1; NS7-1, PA1-12, PA1-13, and PA1-4; NS7-1, PA1-12, PA1-13, and PAP-12; NS7-1, PA1-12, PA1-4, and PAP-12; NS7-1, PA1-12, PA1-4, and PS7-1; NS7-1, PA1-12, PAP-12, and PS7-1; NS7-1, PA1-13, PA1-4, and PA1-9; NS7-1, PA1-13, PA1-4, and PA2-13; NS7-1, PA1-13, PA1-4, and PAP-12; NS7-1, PA1-13, PA1-4, and PS7-1; NS7-1, PA1-13, PA1-9, and PAP-12; NS7-1, PA1-13, PA2-13, and PAP-12; NS7-1, PA1-13, PAP-12, and PS7-1; NS7-1, PA1-4, PA1-9, and PAP-12; NS7-1, PA1-4, PA1-9, and PS7-1; NS7-1, PA1-4, PA2-13, and PAP-12; NS7-1, PA1-4, PA2-13, and PS7-1; NS7-1, PA1-4, PAP-12, and PS7-1; NS7-1, PA1-9, PAP-12, and PS7-1; NS7-1, PA2-13, PAP-12, and PS7-1; PA1-11, PA1-12, PA1-13, and PA1-4; PA1-11, PA1-12, PA1-13, and PAP-12; PA1-11, PA1-12, PA1-4, and PAP-12; PA1-11, PA1-12, PA1-4, and PS7-1; PA1-11, PA1-12, PAP-12, and PS7-1; PA1-11, PA1-13, PA1-14, and PA1-4; PA1-11, PA1-13, PA1-14, and PAP-12; PA1-11, PA1-13, PA1-4, and PA1-9; PA1-11, PA1-13, PA1-4, and PA2-13; PA1-11, PA1-13, PA1-4, and PA2-7; PA1-11, PA1-13, PA1-4, and PAP-12; PA1-11, PA1-13, PA1-4, and PAP-13; PA1-11, PA1-13, PA1-4, and PAP-14; PA1-11, PA1-13, PA1-4, and PAP-4; PA1-11, PA1-13, PA1-4, and PS7-1; PA1-11, PA1-13, PA1-4, and PS7-1; PA1-11, PA1-13, PA1-9, and PAP-12; PA1-11, PA1-13, PA2-13, and PAP-12; PA1-11, PA1-13, PA2-7, and PAP-12; PA1-11, PA1-13, PAP-12, and PAP-13; PA1-11, PA1-13, PAP-12, and PAP-14; PA1-11, PA1-13, PAP-12, and PAP-4; PA1-11, PA1-13, PAP-12, and PS7-1; PA1-11, PA1-13, PAP-12, and PS7-1; PA1-11, PA1-14, PA1-4, and PAP-12; PA1-11, PA1-14, PA1-4, and PS7-1; PA1-11, PA1-14, PAP-12, and PS7-1; PA1-11, PA1-4, PA1-9, and PAP-12; PA1-11, PA1-4, PA1-9, and PS7-1; PA1-11, PA1-4, PA1-9, and PAP-12; PA1-11, PA1-4, PA2-13, and PAP-12; PA1-11, PA1-4, PA2-13, and PS7-1; PA1-11, PA1-4, PA2-7, and PAP-12; PA1-11, PA1-4, PA2-7, and PS7-1; PA1-11, PA1-4, PAP-12, and PAP-13; PA1-11, PA1-4, PAP-12, and PAP-14; PA1-11, PA1-4, PAP-12, and PAP-4; PA1-11, PA1-4, PAP-12, and PS7-1; PA1-11, PA1-4, PAP-12, and PS7-1; PA1-11, PA1-4, PAP-13, and PS7-1; PA1-11, PA1-4, PAP-14, and PS7-1; PA1-11, PA1-4, PAP-4, and PS7-1; PA1-11, PA1-9, PAP-12, and PS7-1; PA1-11, PA2-13, PAP-12, and PS7-1; PA1-11, PA2-7, PAP-12, and PS7-1; PA1-11, PAP-12, PAP-13, and PS7-1; PA1-11, PAP-12, PAP-14, and PS7-1; PA1-11, PAP-12, PAP-4, and PS7-1; PA1-12, PA1-13, PA1-14, and PA1-4; PA1-12, PA1-13, PA1-14, and PAP-12; PA1-12, PA1-13, PA1-4, and PA1-9; PA1-12, PA1-13, PA1-4, and PA2-13; PA1-12, PA1-13, PA1-4, and PA2-7; PA1-12, PA1-13, PA1-4, and PAP-12; PA1-12, PA1-13, PA1-4, and PAP-13; PA1-12, PA1-13, PA1-4, and PAP-14; PA1-12, PA1-13, PA1-4, and PAP-4; PA1-12, PA1-13, PA1-4, and PS7-1; PA1-12, PA1-13, PA1-4, and PS7-1; PA1-12, PA1-13, PA1-9, and PAP-12; PA1-12, PA1-13, PA2-13, and PAP-12; PA1-12, PA1-13, PA2-7, and PAP-12; PA1-12, PA1-13, PAP-12, and PAP-13; PA1-12, PA1-13, PAP-12, and PAP-14; PA1-12, PA1-13, PAP-12, and PAP-4; PA1-12, PA1-13, PAP-12, and PS7-1; PA1-12, PA1-13, PAP-12, and PS7-1; PA1-12, PA1-14, PA1-4, and PAP-12; PA1-12, PA1-14, PA1-4, and PS7-1; PA1-12, PA1-14, PAP-12, and PS7-1; PA1-12, PA1-4, PA1-9, and PAP-12; PA1-12, PA1-4, PA1-9, and PS7-1; PA1-12, PA1-4, PA2-13, and PS7-1; PA1-12, PA1-4, PA2-7, and PAP-12; PA1-12, PA1-4, PA2-7, and PS7-1; PA1-12, PA1-4, PAP-12, and PAP-13; PA1-12, PA1-4, PAP-12, and PAP-14; PA1-12, PA1-4, PAP-12, and PAP-4; PA1-12, PA1-4, PAP-12, and PS7-1; PA1-12, PA1-4, PAP-13, and PS7-1; PA1-12, PA1-4, PAP-14, and PS7-1; PA1-12, PA1-4, PAP-4, and PS7-1; PA1-12, PA1-9, PAP-12, and PS7-1; PA1-12, PA2-13, PAP-12, and PS7-1; PA1-12, PA2-7, PAP-12, and PS7-1; PA1-12, PAP-12, PAP-13, and PS7-1; PA1-12, PAP-12, PAP-14, and PS7-1; PA1-12, PAP-12, PAP-4, and PS7-1; PA1-13, PA1-14, PA1-4, and PA1-9; PA1-13, PA1-14, PA1-4, and PA2-13; PA1-13, PA1-14, PA1-4, and PAP-12; PA1-13, PA1-14, PA1-4, and PS7-1; PA1-13, PA1-14, PA1-9, and PAP-12; PA1-13, PA1-14, PA2-13, and PAP-12; PA1-13, PA1-14, PAP-12, and PS7-1; PA1-13, PA1-4, PA1-9, and PA2-13; PA1-13, PA1-4, PA1-9, and PA2-7; PA1-13, PA1-4, PA1-9, and PAP-12; PA1-13, PA1-4, PA1-9, and PAP-13; PA1-13, PA1-4, PA1-9, and PAP-14; PA1-13, PA1-4, PA1-9, and PAP-4; PA1-13, PA1-4, PA1-9, and PS7-1; PA1-13, PA1-4, PA1-9, and PS7-1; PA1-13, PA1-4, PA2-13, and PA2-7; PA1-13, PA1-4, PA2-13, and PAP-12; PA1-13, PA1-4, PA2-13, and PAP-13; PA1-13, PA1-4, PA2-13, and PAP-14; PA1-13, PA1-4, PA2-13, and PAP-4; PA1-13, PA1-4, PA2-13, and PS7-1; PA1-13, PA1-4, PA2-7, and PAP-12; PA1-13, PA1-4, PA2-7, and PS7-1; PA1-13, PA1-4, PAP-12, and PAP-4; PA1-13, PA1-4, PAP-12, and PS7-1; PA1-13, PA1-4, PAP-12, and PS7-1; PA1-13, PA1-4, PAP-13, and PS7-1; PA1-13, PA1-4, PAP-14, and PS7-1; PA1-13, PA1-4, PAP-4, and PS7-1; PA1-13, PA1-9, PA2-13, and PAP-12; PA1-13, PA1-9, PA2-7, and PAP-12; PA1-13, PA1-9, PAP-12, and PAP-13; PA1-13, PA1-9, PAP-12, and PAP-14; PA1-13, PA1-9, PAP-12, and PAP-4; PA1-13, PA1-9, PAP-12, and PS7-1; PA1-13, PA1-9, PAP-12, and PS7-1; PA1-13, PA2-13, PA2-7, and PAP-12; PA1-13, PA2-13, PAP-12, and PAP-13; PA1-13, PA2-13, PAP-12, and PAP-14; PA1-13, PA2-13, PAP-12, and PAP-4; PA1-13, PA2-13, PAP-12, and PS7-1; PA1-13, PA2-7, PAP-12, and PS7-1; PA1-13, PAP-12, PAP-13, and PS7-1; PA1-13, PAP-12, PAP-14, and PS7-1; PA1-13, PAP-12, PAP-4, and PS7-1; PA1-14, PA1-4, PA1-9, and PAP-12; PA1-14, PA1-4, PA1-9, and PS7-1; PA1-14, PA1-4, PA2-13, and PAP-12; PA1-14, PA1-4, PA2-13, and PS7-1; PA1-14, PA1-4, PAP-12, and PS7-1; PA1-14, PA1-9, PAP-12, and PS7-1; PA1-14, PA2-13, PAP-12, and PS7-1; PA1-4, PA1-9, PA2-13, and PAP-12; PA1-4, PA1-9, PA2-13, and PS7-1; PA1-4, PA1-9, PA2-7, and PAP-12; PA1-4, PA1-9, PA2-7, and PS7-1; PA1-4, PA1-9, PAP-12, and PAP-13; PA1-4, PA1-9, PAP-12, and PAP-14; PA1-4, PA1-9, PAP-12, and PAP-4; PA1-4, PA1-9, PAP-12, and PS7-1; PA1-4, PA1-9, PAP-13, and PS7-1; PA1-4, PA1-9, PAP-14, and PS7-1; PA1-4, PA1-9, PAP-4, and PS7-1; PA1-4, PA2-13, PA2-7, and PAP-12; PA1-4, PA2-13, PA2-7, and PS7-1; PA1-4, PA2-13, PAP-12, and PAP-13; PA1-4, PA2-13, PAP-12, and PAP-14; PA1-4, PA2-13, PAP-12, and PAP-4; PA1-4, PA2-13, PAP-12, and PS7-1; PA1-4, PA2-13, PAP-13, and PS7-1; PA1-4, PA2-13, PAP-14, and PS7-1; PA1-4, PA2-13, PAP-4, and PS7-1; PA1-4, PA2-7, PAP-12, and PS7-1; PA1-4, PAP-12, PAP-13, and PS7-1; PA1-4, PAP-12, PAP-14, and PS7-1; PA1-4, PAP-12, PAP-4, and PS7-1; PA1-9, PA2-13, PAP-12, and PS7-1; PA1-9, PA2-7, PAP-12, and PS7-1; PA1-9, PAP-12, PAP-13, and PS7-1; PA1-9, PAP-12, PAP-14, and PS7-1; PA1-9, PAP-12, PAP-4, and PS7-1; PA2-13, PA2-7, PAP-12, and PS7-1; PA2-13, PAP-12, PAP-13, and PS7-1; PA2-13, PAP-12, PAP-14, and PS7-1; or PA2-13, PAP-12, PAP-4, and PS7-1.

[0016] In certain aspects, the application provides a composition comprising at least two bacteriophages capable of lysing one or more strains of a P. acnes bacterium, wherein the first selected phage infects and lyses P. acnes strain B9, the second selected phage infects and lyses P. acnes strain PA4, and wherein the two selected phages have different lytic specificities from one another with respect to P. acnes strains B9 and PA4.

[0017] In certain aspects, the application provides a composition comprising at least two bacteriophages capable of lysing one or more strains of a P. acnes bacterium, wherein the first selected phage infects and lyses P. acnes strain PA3, the second selected phage infects and lyses P. acnes strain B9, and wherein the two selected phages have different lytic specificities from one another with respect to P. acnes strains PA3 and B9.

[0018] In certain aspects, the application provides a composition comprising at least two bacteriophages capable of lysing one or more strains of a P. acnes bacterium, wherein the first selected phage infects and lyses P. acnes strain PA3, the second selected phage infects and lyses P. acnes strain PA5, and wherein the two selected phages have different lytic specificities from one another with respect to P. acnes strains PA3 and PA5.

[0019] In certain aspects, the application provides a composition comprising at least two bacteriophages capable of lysing one or more strains of a P. acnes bacterium, wherein the first selected phage infects and lyses P. acnes strain PA4, the second selected phage infects and lyses P. acnes strain PA5, and wherein the two selected phages have different lytic specificities from one another with respect to P. acnes strains PA4 and PA5.

[0020] In some embodiments, the one or more of the above compositions (see [0009]-[0018]) also comprise at least one phage that infects and lyses at least one P. acnes strain selected from PA1, PA2, PA6, PA7, PA8, PA9, PA10, PA11, and PAP. In some embodiments, the one or more of the above compositions comprise phages that infect and lyse each of P. acnes strains PA1, PA2, PA6, PA7, PA8, PA9, PA10, PA11, and PAP in toto.

[0021] In certain aspects, the application provides a composition comprising at least three bacteriophages capable of lysing one or more strains of a P. acnes bacterium, wherein the first selected phage infects and lyses P. acnes strain PA3, the second selected phage infects and lyses P. acnes strain PA4, and the third selected phage infects and lyses P. acnes strain B9, wherein each of the three selected phages have different lytic specificities from one another with respect to P. acnes strains PA3, PA4 and B9.

[0022] In some embodiments, the one or more of the above compositions (see [0009]-[0018]) comprises at least three bacteriophages selected from PS7-1, PA1-11, PAP-12, PA1-9 and PA1-13. In preferred embodiments, the composition comprises the following combinations of bacteriophages formulated for delivery to skin, eyes, teeth, or to an implant: PAP-12, PA1-9, and PA1-13; PS7-1, PA1-9, and PA1-13; PAP-12, PA1-9, PA1-13, and PS7-1; PA1-13, PAP-12, and PA1-11; or PS7-1, PA1-13, and PAP-12.

[0023] In some embodiments, the composition is formulated for delivery to mammalian skin, mammalian eyes, mammalian teeth or an implant to be inserted into a mammal. Preferably, the mammal is a human.

[0024] In some embodiments, the composition is formulated for topical application. In some embodiments, the composition is in the form of a gel, cream, ointment, lotion, paste, solution, microemulsion, liquid wash, spray, application stick, cosmetic, dressing, face-wash, soap, powder, spray, capsule, eye drop, eye ointment, eye lotion, solid, or a moist sponge wipe, or is bonded to a solid surface. In some embodiments, the composition comprises an adjuvant, a carrier or a vehicle. In some embodiments, the composition comprises one or more additives selected from solubilizers, emollients, humectants, thickening agents, permeation enhancers, chelating agents, antioxidants, buffering agents, isotonic agents, suspending agents, emulsifying agents, stabilizers and preservatives. In some embodiments, the composition comprises one or more of a gel-forming agent, a cream-forming agent, a wax, an oil, a surfactant, and a binder.

[0025] In certain aspects, the application provides a method for treating or preventing acne in a subject in need or at risk thereof, the method comprising administering to the subject a composition comprising (a) a first bacteriophage that infects and lyses at least one Propionibacterium acnes (P. acnes) strain selected from B9, PA4, PA3, and PA5; and (b) a second bacteriophage that infects and lyses at least one P. acnes strain selected from B9, A4, PA3, and PA5 that is not infected and lysed by the first bacteriophage. In some embodiments, the composition comprises (a) a first bacteriophage that infects and lyses at least one P. acnes strain selected from B9, PA4, PA3, and PA5; (b) a second bacteriophage that infects and lyses at least one P. acnes strain selected from B9, PA4, PA3, and PA5; and (c) a third bacteriophage that infects and lyses at least one P. acnes strain selected from B9, PA4, PA3, and PA5; wherein at least one P. acnes strain infected by the second bacteriophage is not infected and lysed by at least one of the first bacteriophage and the third bacteriophage, and wherein at least one P. acnes strain infected by the third bacteriophage is not infected and lysed by at least one of the first bacteriophage and the second bacteriophage. In some embodiments, the composition comprises (a) a first bacteriophage that infects and lyses P. acnes strain PA3; (b) a second bacteriophage that infects and lyses P. acnes strain PA4; and (c) a third bacteriophage that infects and lyses P. acnes strain B9, wherein each of the three bacteriophages have different lytic specificities from one another with respect to P. acnes strains PA3, PA4 and B9. In some embodiments, the application provides a method for treating or preventing acne in a subject in need or at risk thereof, by administering to the subject a composition comprising a mixture of phages that can infect and lyse one or more strains of P. acnes bacteria in combination with one or more topical or oral agents selected from a list comprising an antibiotic, an anti-comedonal, an anti-P. acnes agent other than a bacteriophage, an anti-inflammatory, an anti-seborrhoeic agent, a keratolytic agent, a sebum penetration enhancer, and a sunscreen. In some embodiments, the application provides a method for reducing the amount of P. acnes in/on the skin, eyes, and/or teeth of a subject, by administering to the subject a composition comprising a mixture of bacteriophages that are capable of lysing one or more strains of P. acnes bacteria.

[0026] In some embodiments, the antibiotic agent is an antibiotic gel, an antibiotic cream, an antibiotic lotion or an oral antibiotic. In some embodiments, the anti-comedonal agent comprises one or more of a retinoid, azelaic acid and isotretinoin. In some embodiments, the anti-P. acnes agent comprises one or more of benzoyl peroxide, dapsone, azelaic acid, erythromycin, tetracycline and clindamycin, sodium sulfacetamide, adapalene, minocycline, trimethoprim, nadifloxacin, ofloxacin, doxycycline, ampicillin, cephalexin, gentamycin, and trimethoprimsulfamethoxazole. In some embodiments, the anti-inflammatory agent comprises one or more of tetracycline, erythromycin, clindamycin, nicotinamide, minocycline, trimethoprim and isotretinoin. In some embodiments, the anti-seborrhoeic agent comprises one or more of spironolactone, Dianette™ (cyproterone acetate and ethinylestradiol) and isotretinoin.

[0027] In some embodiments, the keratolytic agent comprises one or more of glycolic acid, lactic acid, mandelic acid, hydroxycapric acid, phytic acid, malic acid, citric acid, tartaric acid, salicylic acid, urea, and sulfur. In some embodiments, the sebum penetration enhancer comprises one or more of a sebum softener, sebum solubilizer and an emulsifier. In some embodiments, the sebum penetration enhancer comprises one or more of polysorbates or other non-ionic surfactants (e.g. polysorbates 20, 80 etc.), unsaturated fatty acids (e.g. oleic acid), unsaturated alcohols (e.g. oleyl alcohol), aliphatic alcohols (e.g. ethanol and isopropyl alcohol), transcutol (diethylene glycol monoethyl ether), phospholipids, unsaturated triglycerides, propylene glycol, and dipropylene glycol.

[0028] In some embodiments, the bacteriophage composition is administered every 12 hours, 24 hours, 48 hours or 72 hours at a dose of 10⁵ to 10¹³ plaque forming units (PFU) for the composition as a whole. In preferred embodiments, the bacteriophage composition is administered every 12 hours, 24 hours, 48 hours, or 72 hours at a dose of 10⁷ to 10¹¹ PFU. In other preferred embodiments, the bacteriophage composition is administered every 12 hours, 24 hours, 48 hours, or 72 hours at a dose of 10⁶ to 10¹¹ PFU. In yet other preferred embodiments, the bacteriophage composition is administered every 12 hours, 24 hours, 48 hours, or 72 hours at a dose of 10⁷ to 10⁹ PFU.

[0029] The different bacteriophage present in the compositions disclosed herein may be present in equal or non-equal titer amounts. In some embodiments, the specified bacteriophage are present at equal titers (e.g., 1:1, first bacteriophage:second bacteriophage; 1:1:1, first bacteriophage:second bacteriophage:third bacteriophage, etc.). In other embodiments phage may be present at different relative titers. For example, a higher titer ratio of a specific bacteriophage to the other bacteriophage may be useful when the former bacteriophage has lower stability over time in the final formulation than the latter bacteriophage(s). In such a case the amount of the bacteriophage of lower stability may be increased so as to maintain a minimum titer over a desired product shelf life. In such embodiments, the ratio of less stable bacteriophage to more stable bacteriophages can be, e.g., 2:1, 5:1, 10:1, 25:1, 50:1, 100:1, 500:1, 1,000:1, 5,000:1 or 10,000:1 or the range of any ratios between 2:1 to 10,000:1.

[0030] In still other embodiments, a low manufacturing yield of one of the bacteriophage and/or volume limitations during formulation may lead to such bacteriophage being present at a lower titer compared to the other bacteriophage(s) in the composition. In these embodiments, the former bacteriophage may be present at up to 10,000 times lower initial titer than the other bacteriophage(s) in the composition. In such embodiments, the titer ratio of the former bacteriophage to the other bacteriophage(s) can be, e.g., 1:2, 1:5, 1:10, 1:25, 1:50, 1:100, 1:500, 1:1,000, 1:5,000 or 1:10,000.

[0031] In some embodiments, the acne is acne vulgaris, that is presented as lesions. In some embodiments, the lesions are non-inflamed or inflamed. In some embodiments, the non-inflamed lesions are comedones. In some embodiments, the inflamed lesions are papules, pustules, nodules or cysts. In some embodiments, the comedones are blackheads or whiteheads. In some embodiments, the acne is acne conglobata, acne fulminans, Hidradentis suppurativa, scalp acne (scalp folliculitis, acne necrotica miliaris or Propionibacterium folliculitis), acne associated with Progressive Macular Hypomelanosis, acne associated with SAPHO syndrome, or acne associated with Fatal Bacterial Granuloma after Trauma.

[0032] In some embodiments, the subject presents with a skin disease associated with one or more strains of P. acnes bacteria, or is at risk of developing such disease.

[0033] In some aspects, the application provides a method of selecting a mixture of phages that can treat a subject, comprising the steps of (i) obtaining a biological sample from the affected area or area to be treated or potentially treated of the subject, (ii) culturing bacteria obtained from the biological sample, (iii) inoculating the cultured bacteria with a mixture of bacteriophages, and (iv) determining which if any of the cultured bacteria are lysed by the mixture of bacteriophages, wherein when any of the cultured bacteria are lysed by the mixture of bacteriophages, the subject is determined to be treatable by the mixture of bacteriophages.

[0034] In some aspects, the application provides a composition comprising a mixture of phages that are capable of lysing one or more strains of P. acnes bacteria, formulated for pretreatment of an implant.

[0035] In some embodiments, the application provides a method for treating or preventing the development of a P. acnes containing biofilm on an implant, or reducing the amount of P. acnes in a biofilm on an implant, the method comprising applying to the implant, a composition comprising a mixture of bacteriophages that are capable of lysing one or more strains of a P. acnes bacterium. The following one or more may also be applied to the implant simultaneously or sequentially with the bacteriophage composition, i.e. from a single formulation or from separate formulations packaged either together or individually: an antimicrobial substance, a hydrophilic polymer coating, a polymer brush coating, or a contact-killing surface coating. In some embodiments, the implant releases the phage and, optionally, an antimicrobial substance from a coating or is impregnated with an antimicrobial substance. In some embodiments, the coating is one or more of a hydrogel, a nanotube, a microporous calcium phosphate coating, a mesh coating, a nanoparticle coating, a microsphere coating or a polymer coating. In some embodiments, the implant is manufactured using 3D-printing or electrospinning and incorporates the antimicrobial substance within the implant.

[0036] In some embodiments, the application provides a method for treating or preventing the development of P. acnes biofilm on an implant, the method comprising applying on an implant, a composition comprising a mixture of bacteriophages that are capable of lysing one or more strains of a P. acnes bacterium, formulated for pretreatment of an implant. In some aspects of these embodiments, the implant is a sensory or neurological implant, a cardiovascular medical device, an orthopedic implant or biomaterial, a contraceptive implant, a cosmetic implant, a dental implant, a prosthetic device, an orthopedic biomaterial, or an implant for organ dysfunction.

[0037] In some embodiments, the sensory or neurological implant is an intraocular lens, contact lens, scleral buckle, conjunctival plug, lacrimal intubation device, orbital implant, suture material, intrastromal corneal ring segment, cochlear implant, tympanostomy tube, or a neurostimulator. In some embodiments, the sensory or neurological implant is used in one or more conditions selected from a list comprising cataract, glaucoma, keratoconus, visual impairments, otosclerosis, hearing loss impairments, otitis media, middle ear diseases, epilepsy, Parkinson's disease, and treatment-resistant depression.

[0038] In some embodiments, the cardiovascular medical device is an artificial heart, artificial heart valve, implantable cardioverter-defibrillator, cardiac pacemaker, or a coronary stent. In some embodiments, the cardiovascular medical device is used in one or more conditions selected from a list comprising heart failure, cardiac arrhythmia, ventricular tachycardia, valvular heart disease, angina pectoris, and atherosclerosis.

[0039] In some embodiments, the orthopedic implant or biomaterial is a pin, rod, screw, plate, metallic glass, or a biodegradable medical implant. In some embodiments, the orthopedic implant or biomaterial is used in one or more conditions selected from a list comprising bone fractures, osteoarthritis, scoliosis, spinal stenosis, and chronic pain.

[0040] In some embodiments, the contraceptive implant is a copper- or hormone-based intrauterine device. In some embodiments, the contraceptive implant is used in one or more conditions selected from a list comprising preventing an unintended pregnancy, menorrhagia and polycystic ovarian syndrome.

[0041] In some embodiments, the cosmetic implant is a prosthetic, breast implant, shoulder implant, nose prosthesis, or ocular prosthesis. In some embodiments, the cosmetic implant is used in one or more conditions selected from a list comprising mastectomy, augmentation of the buttock, and augmentation of the chin.

[0042] In some embodiments, the implant for organ dysfunction is the LINX, implantable gastric stimulator, diaphragmatic/phrenic nerve stimulator, neurostimulator, surgical mesh, or penile prosthesis. In some embodiments, the implant for organ dysfunction is used in one or more conditions selected from a list comprising gastroesophageal reflux disease, gastroparesis, respiratory failure, sleep apnea, urinary and fecal incontinence, and erectile dysfunction.

[0043] In some embodiments of any of the above methods, any one or more of the phage set forth in Table 1 is present in the composition and comprises the nucleotide sequence of the SEQ ID NO for that phage as indicated in Table 1.

TABLE 1
Nucleotide sequence identification numbers of the phages used in this study.

| SEQ ID | Brief | Size |
|---|---|---|
| NO. | Description | (base pairs) |
| 1 | NS13 Bacteriophage sequence | 29,671 |
| 2 | NS19-1 Bacteriophage sequence | 30,056 |
| 3 | NS7-1 Bacteriophage sequence | 29,695 |
| 4 | PA1-11 Bacteriophage sequence | 29,491 |
| 5 | PA1-12 Bacteriophage sequence | 29,197 |
| 6 | PA1-13 Bacteriophage sequence | 29,968 |
| 7 | PA1-14 Bacteriophage sequence | 29,780 |
| 8 | PA1-4 Bacteriophage sequence | 29,097 |
| 9 | PA1-9 Bacteriophage sequence | 29,335 |
| 10 | PA2-13 Bacteriophage sequence | 29,698 |
| 11 | PA2-4 Bacteriophage sequence | 29,637 |
| 12 | PA2-7 Bacteriophage sequence | 29,724 |
| 13 | PAP-1 Bacteriophage sequence | 29,581 |
| 14 | PAP-11 Bacteriophage sequence | 29,912 |
| 15 | PAP-12 Bacteriophage sequence | 29,568 |
| 16 | PAP-13 Bacteriophage sequence | 29,960 |
| 17 | PAP-14 Bacteriophage sequence | 30,343 |
| 18 | PAP-4 Bacteriophage sequence | 29,835 |
| 19 | PAP-7 Bacteriophage sequence | 29,917 |
| 20 | PAP-8 Bacteriophage sequence | 29,385 |
| 21 | PS7-1 Bacteriophage sequence | 29,882 |

### BRIEF DESCRIPTION OF THE DRAWINGS

[0044] The foregoing summary, as well as the following detailed description, may be better understood when read in conjunction with the appended drawings. For the purpose of illustration, there are shown in the drawings embodiment(s) which are presently preferred. It should be understood, however, that the application is not limited to the precise arrangements and instrumentalities shown.

[0045] FIG. 1. Host range of the phage on P. acnes strains. Host range analysis for phage isolated on the P. acnes strains PA1, PA2 and PAP is performed on nine additional P. acnes strains; PA3, PA4, PA5, PA6, PA7, PA8, PA9, PA10 and PA11. Each of the phage are added (10 μL) to bacterial lawns of the different P. acnes strains, in 48 well plates by drop assay. Plates are incubated for overnight (37° C.) in anaerobic conditions, after which plaques become visible on the bacterial lawns. Plates with bacterial lawns of PA1, PA2 and PAP and their respective phage served as positive control. Host range is tested for each of the phage using 10 μL containing 10⁴ phage per well. +++− plaques too numerous to count or total clearing, ++− countable number of plaques greater than 10, +−1 to 10 visible plaques, −−no visible plaques.

[0046] FIG. 2. Host range of phage on a subset of the clinical isolates of P. acnes strains. The phage sensitivity of P. acnes strains isolated from skin samples of healthy volunteers or acne patients is tested. Host range analysis for phage isolated on the P. acnes strains PA1, PA2 and PAP is performed on 14 strains obtained from clinical isolates of P. acnes. Each of the phage are added (10 μL) to bacterial lawns of the different P. acnes strains, in 48 well plates by drop assay. Plates are incubated for 24 hrs (37° C.) in anaerobic conditions, after which plaques become visible on the bacterial lawns. Host range is tested for each of the phage using either the drop assay as above (10 μL containing 10⁴ phage) or a modified drop assay using instead 5 μL containing 10⁴ phage per well. +++− plaques too numerous to count or total clearing, ++− countable number of plaques greater than 10, +− 1 to 10 visible plaques, −− no visible plaques, NT—not tested.

[0047] FIG. 3. Non-infectivity of P. granulosum clinical strain PAC4 by P. acnes phage. Host range analysis for phage isolated on the P. acnes strains PA1, PA2 and PAP is performed on a P. granulosum strain PAC4. Each of the phage are added (10 μL) to bacterial lawns of the P. granulosum strain in 48 well plates by drop assay. Plates are incubated overnight (37° C.) in anaerobic conditions, after which plaques become visible on the bacterial lawns. Host range is tested for each of the phage at a concentration of 10⁶ PFU/mL. +++− plaques too numerous to count or total clearing, ++− countable number of plaques greater than 10, +− 1 to 10 visible plaques, −− no visible plaques.

[0048] FIG. 4. Susceptibility of B9 mutant bacteria to phage to which original PA3 strain is sensitive. The ability of phage to infect the B9 mutant of the P. acnes PA3 strain which was isolated based on the resistance it had developed to PAP-1 was examined as described. Each of the phage are added (10 μL) to bacterial lawns of the B9 strain, in 48 well plates by drop assay. Plates are incubated overnight (37° C.) in anaerobic conditions, after which plaques become visible on the bacterial lawns. The ability of each phage to infect the B9 mutant strain is tested at a concentration of 10⁶ PFU/mL. R-resistant to the infection with the tested phage, S-sensitive to the infection with the tested phage.

[0049] FIG. 5. Non-interference of other phage with PAP-12 infection of host PA4. The ability to combine several phage in a mixture without impairing the specific function of any individual phage is tested as described. The phage sensitivity of the PA4 strain (grown in BHIS) is tested on the phage isolated on the P. acnes strains PA1, PA2 and PAP in the presence or absence of the phage PAP-12. Each of the phage, mixed either in a 1:1 ratio with fresh BHIS or 1:1 with the stock of PAP-12 are added (10 μL) to bacterial lawns of the PA4 strain in 48 well plates by drop assay. Plates are incubated overnight (37° C.) in anaerobic conditions, after which plaques become visible on the bacterial lawns. Each of the phage is tested at a concentration of 10⁶ PFU/mL. +++− plaques too numerous to count or total clearing, ++− countable number of plaques greater than 10, +− 1 to 10 visible plaques, −− no visible plaques.

[0050] FIG. 6. Phage versus antibiotic sensitivity of a subset of clinical strains. The susceptibility of various clinical P. acnes and P. granulosum strains to individual phage, phage mixtures and antibiotic application is tested as described. Each of the phage or phage mixtures are either tested using the drop assay as described before, or added (5 μL) to bacterial lawns of the different bacterial strains. Plates are incubated for 24 hrs (37° C.) in anaerobic conditions, after which plaques become visible on the bacterial lawns. Host susceptibility is tested for each of the phage using 5 μL containing 10⁴ phage. Antibiotic susceptibility of the strains is measured by placing 5-10 μL of the antibiotic on a bacterial lawn of each strain, and incubating overnight at 37° C. in anaerobic conditions. ++− total clearing, +− partial clearing, −− no clearing, NT—not tested; Cocktail 1—PA1-13+PS7-1+PA1-9; Cocktail 2—PA1-13+PS7-1+PAP-12.

[0051] FIG. 7. Prevention of ear swelling by phage in mouse model of P. acnes infection. 3 groups of mice are subjected to model induction by a single intradermal injection of 20 μL P. acnes strain PA1 (10¹⁰ CFU/mL) in the right ear along with 20 μL of PBS in the left ear as control. (group 1; n=20). In the treatment groups, 20 μL of phage suspension (PAP-7) is injected into the right ear and 20 μL PBS into the left ear 3 hours post PA1 injection (group 2; n=20), or 20 μL PAP-7 into the right ear and 20 μL PBS into the left ear 3 hours before PA1 injection (group 3; n=20). Group 1 serves as a control for model induction. The ratio of right/left ear thickness measurements is determined in mice immediately before model induction, and 24 hrs, 48 hrs and 72 hrs post model induction. Error bars indicate mean±SEM. p=0.03, group 1 vs group 3 at 24 hrs.

[0052] FIG. 8. Phage activity demonstrated in topical mouse model of swelling caused by P. acnes. 3 groups of mice are subjected to model induction by gentle scratching of the ear, followed by a single topical application of 10 μL PA1 suspension (10¹⁰ CFU/mL) (Groups 2, 3, and 4) or PBS (Group 1), subsequently followed by phage administration 30 min and 3 hrs after model induction as outlined in FIG. 8. Group 2 receives 10 μL of phage suspension (PS7-1, PAP-1, PAP-12) containing 10⁸ CFU/mL while Group 3 received 10 μL of phage suspension containing 10¹¹ CFU/mL. Ear thickness is measured 24 hrs after model induction. Error bars indicate mean±SEM. P=0.03 (group 3); P=0.02 (group 4).

[0053] FIG. 9. Increased time to appearance of PA3 resistant mutant demonstrated in the presence of a phage mixture vs a single phage. FIG. 9 illustrates the growth characteristics of the PA3 strain cultured alone or in the presence of phage PAP-1, PA1-4, or a combination of PAP-1 and PA1-4. PA3 is cultured overnight anaerobically at 37° C. in a 4 mL BHIS culture tube, diluted the morning after 1:3, incubated for 4 hours until reaching OD 0.8-1.2 and further diluted to OD 0.2. Phages PAP-1 and PA1-4 are diluted to 10⁸ PFU/mL, and a 1:1 mixture of these phage at this concentration is also prepared. The PA3 culture is dispensed at 190 μL per well into a 96-well plate, after which 10 μL of the phage containing samples are added in triplicates. Finally, this is covered with 40 μL of mineral oil. The plate is sealed and incubated in a Tecan M200 Pro plate reader at 37° C. to follow the infection dynamics with measurements every 15 minutes.

[0054] FIG. 10. Genetic analysis of phage. Percent homology of phages isolated against PA1, PA2, and PAP. Percent homology between the phages genomes is determined by combining all non-overlapping BLASTN alignment segments (BLAST HSPs), summing the values of their “Number of identical matches” and dividing this sum by the length of the longer of the two sequences. In some embodiments, this results in a non-symmetrical matrix.

[0055] FIG. 11. Efficacy of phage cocktail on clinical P. acnes strains. FIGS. 11 (a-c) show the therapeutic efficacy of the phage cocktail (PS7-1, PA1-13, and PAP-12) on 119 clinical P. acnes strains isolated from 50 volunteers, 26 of whom had acne vulgaris grades 1-4 was examined as described in Example 12. R-resistant to the infection with the tested phage cocktail, S-sensitive to the infection with the tested phage cocktail.

[0056] FIG. 12. Efficacy of phage cocktail on clinical P. acnes strains. The therapeutic efficacy of the phage cocktail (PS7-1, PA1-13, and PAP-12) on 24 antibiotic resistant clinical P. acnes strains isolated from 10 volunteers, 6 of whom had acne vulgaris grades 1-4 was examined as described in Example 12. The susceptibility of these strains to various antibiotics was also measured as described in Example 12. R-resistant to the infection with the tested phage cocktail, S-sensitive to the infection with the tested phage cocktail, C—resistant to 0.5 μg/ml clindamycin, E—resistant to 0.5 μg/ml erythromycin, T—resistant to 5 μg/ml tetracycline, M resistant to 5 μg/ml minocycline.

### DETAILED DESCRIPTION

[0057] Unless otherwise defined herein, scientific and technical terms used in this application shall have the meanings that are commonly understood by those of ordinary skill in the art. Generally, nomenclature used in connection with, and techniques of, pharmacology, cell and tissue culture, molecular biology, cell and cancer biology, neurobiology, neurochemistry, virology, immunology, microbiology, genetics and protein and nucleic acid chemistry, described herein, are those well-known and commonly used in the art. In case of conflict, the present specification, including definitions, will control.

[0058] The practice of the present application will employ, unless otherwise indicated, conventional techniques of molecular biology (including recombinant techniques), microbiology, cell biology, biochemistry and immunology, which are within the skill of the art. Such techniques are explained fully in the literature, such as, Molecular Cloning: A Laboratory Manual, second edition (Sambrook et al., 1989) Cold Spring Harbor Press; Oligonucleotide Synthesis (M. J. Gait, ed., 1984); Methods in Molecular Biology, Humana Press; Cell Biology: A Laboratory Notebook (J. E. Cellis, ed., 1998) Academic Press; Animal Cell Culture (R. I. Freshney, ed., 1987); Introduction to Cell and Tissue Culture (J. P. Mather and P. E. Roberts, 1998) Plenum Press; Cell and Tissue Culture: Laboratory Procedures (A. Doyle, J. B. Griffiths, and D. G. Newell, eds., 1993-1998) J. Wiley and Sons; Methods in Enzymology (Academic Press, Inc.); Gene Transfer Vectors for Mammalian Cells (J. M. Miller and M. P. Calos, eds., 1987); Current Protocols in Molecular Biology (F. M. Ausubel et al., eds., 1987); PCR: The Polymerase Chain Reaction, (Mullis et al., eds., 1994); Sambrook and Russell, Molecular Cloning: A Laboratory Manual, 3rd. ed., Cold Spring Harbor Laboratory Press, Cold Spring Harbor, N.Y. (2001); Ausubel et al., Current Protocols in Molecular Biology, John Wiley & Sons, N Y (2002); Harlow and Lane Using Antibodies: A Laboratory Manual, Cold Spring Harbor Laboratory Press, Cold Spring Harbor, N.Y. (1998); Coligan et al., Short Protocols in Protein Science, John Wiley & Sons, N Y (2003); Short Protocols in Molecular Biology (Wiley and Sons, 1999).

[0059] The nomenclatures used in connection with, and the laboratory procedures and techniques of biochemistry, immunology, microbiology, molecular biology, and virology described herein are those well-known and commonly used in the art.

[0060] Throughout this specification and embodiments, the word “comprise,” or variations such as “comprises” or “comprising,” will be understood to imply the inclusion of a stated integer or group of integers but not the exclusion of any other integer or group of integers.

[0061] It is understood that wherever embodiments are described herein with the language “comprising,” otherwise analogous embodiments described in terms of “consisting of” and/or “consisting essentially of” are also provided.

[0062] The term “including” is used to mean “including but not limited to.” “Including” and “including but not limited to” are used interchangeably.

[0063] Any example(s) following the term “e.g.” or “for example” is not meant to be exhaustive or limiting.

[0064] Unless otherwise required by context, singular terms shall include pluralities and plural terms shall include the singular.

[0065] The articles “a”, “an” and “the” are used herein to refer to one or to more than one (i.e., to at least one) of the grammatical object of the article. By way of example, “an element” means one element or more than one element. Reference to “about” a value or parameter herein includes (and describes) embodiments that are directed to that value or parameter per se. For example, description referring to “about X” includes description of “X.” Numeric ranges are inclusive of the numbers defining the range. As used herein, the term “about” permits a variation of ±10% within the range of the significant digit.

[0066] Notwithstanding that the disclosed numerical ranges and parameters are approximations, the numerical values set forth in the specific examples are reported as precisely as possible. Any numerical value, however, inherently contains certain errors necessarily resulting from the standard deviation found in their respective testing measurements. Moreover, all ranges disclosed herein are to be understood to encompass any and all subranges subsumed therein. For example, a stated range of “1 to 10” should be considered to include any and all subranges between (and inclusive of) the minimum value of 1 and the maximum value of 10; that is, all subranges beginning with a minimum value of 1 or more, e.g., 1 to 6.1, and ending with a maximum value of 10 or less, e.g., 5.5 to 10.

[0067] Where aspects or embodiments are described in terms of a Markush group or other grouping of alternatives, the present application encompasses not only the entire group listed as a whole, but each member of the group individually and all possible subgroups of the main group, and also the main group absent one or more of the group members. The present application also envisages the explicit exclusion of one or more of any of the group members in the Markush group or other grouping of alternatives.

[0068] Exemplary methods and materials are described herein, although methods and materials similar or equivalent to those described herein can also be used in the practice or testing of the various aspects and embodiments. The materials, methods, and examples are illustrative only and not intended to be limiting.

### Definitions

[0069] In order that the disclosure may be more readily understood, certain terms are first defined. These definitions should be read in light of the remainder of the disclosure and as understood by a person of ordinary skill in the art. Unless defined otherwise, all technical and scientific terms used herein have the same meaning as commonly understood by a person of ordinary skill in the art. Additional definitions are set forth throughout the detailed description.

[0070] As used herein, the term “treat” and its cognates refers to a full or partial amelioration or modulation of acne or at least one discernible symptom thereof. In some embodiments, “treat” and “modulate” and their cognates refer to an amelioration of at least one measurable physical parameter, not necessarily discernible by the patient. In some embodiments, “treat” and its cognates refers to inhibiting or reducing or slowing the progression of acne, either physically (e.g., stabilization of a discernible symptom), physiologically (e.g., stabilization of a physical parameter), or both, relative to an untreated control. In certain embodiments, “treat” and its cognates refers to slowing the progression or reversing the progression of acne relative to an untreated control.

[0071] As used herein, “prevent” and its cognates refer to delaying the onset or delaying the time of return of or reducing the risk of acquiring acne or a symptom associated with acne relative to an untreated control, or delaying the onset or reducing the risk of developing a biofilm comprising one or more P. acnes strains in/on skin, eyes, teeth or an implant, or delaying the onset or reducing the risk of acquiring an implant-related internal infection associated with P. acnes or a symptom associated with an implant-related internal infection associated with P. acnes relative to an untreated control. As used herein, “delaying the time of the return” and its cognates refer to delaying a recurrence of acne or a symptom associated with acne in an individual susceptible to developing acne relative to an untreated control.

[0072] As defined here, the term “infect” or “capable of infecting” refers to the ability of a phage to kill and lyse the host cell. The ability of a phage to infect P. acnes is determined in a spot drop assay or in solution as described herein wherein the formation of plaques or a clearing zone on a soft agar plate with P. acnes colonies or reduction in optical density indicating bacterial concentration demonstrates that the phage had successful infection. As defined herein, the term “lyse” or “lysis” refers to the ability of a phage to cause dissolution or destruction of P. acnes cell membranes, thereby eliminating the P. acnes. A bacteriophage present in the compositions of this invention is considered capable of “lysing” or “infecting and lysing” a bacterial strain when the bacterial strain has a sensitivity to the phage of S (for B9 strains), or ++ or +++ for any other strain.

[0073] As defined herein, the term “lytic specificity” refers to the ability of a phage to lyse a particular designated P. acnes strain. Lytic specificity is determined by the ability of a phage, when used at a concentration of about 10⁶ PFU/mL in a solid media assay, to infect and lyse P. acnes colonies seen as a lawn on a soft agar plate at a +, ++, or +++ level, where, ++ indicates a countable number of plaques greater than 10, and +++ indicates that the plaques are too numerous to count or total clearing. In most preferred embodiments, the lytic specificity of the phage for a particular strain of P. acnes is at a +++ level. In other preferred embodiments, the lytic specificity of the phage for a particular strain of P. acnes is at a ++ level. In some embodiments, the lytic specificity of a phage for the B9 strain is determined by the ability of a phage to infect and lyse B9colonies on a lawn on a soft agar plate at an R, or S level where R indicates that the B9 strains is resistant to the infection with the tested phage, and S indicates that the B9 strain is sensitive to the infection with the tested phage. For the purposes of this application, an “S” designation for infection of B9 means the appearance of any plaques in at least two individual experiments wherein the tested phage is used to infect and lyse B9 colonies on a soft agar plate.

[0074] As used herein, the term “acne” refers to a skin condition that occurs when hair follicles become plugged with oil and dead skin cells. It is characterized by whiteheads, blackheads pimples, nodules, cysts, oily skin and scarring that can appear on various body structures including but not limited to the face, forehead, chest, upper back and shoulders. The major pathophysiological features of acne include but are not limited to hyperkeratinization, sebum production, bacterial proliferation and inflammation. In some embodiments, acne is associated with inflammatory activity of one or more strains of P. acnes. In some embodiments, acne is characterized by noninflammatory, open or closed comedones and by inflammatory papules, pustules, and nodules. As used herein, acne refers to acne vulgaris, acne conglobata, acne fulminans, Hidradentis suppurativa, scalp acne, acne associated with Progressive Macular Hypomelanosis, acne associated with SAPHO syndrome or acne associated with Fatal Bacterial Granuloma after Trauma.

[0075] As used herein, the term “biofilm” refers to a sessile community of microbial cells, comprising one or more P. acnes strains, that (i) are attached to a substratum, interface, or each other; (ii) are embedded in a matrix of (at least partially self-produced) extracellular polymeric substances; and (iii) exhibit an altered phenotype with regard to growth, gene expression, and protein production compared to planktonic bacterial cells (Achermann et al., 2014). The basic ingredients of a biofilm are microbes, glycocalyx, and surface (Dunne W M, 2002). The biofilm matrix may be composed of endogenously and exogenously produced polysaccharides, protein, and/or extracellular DNA, in proportions based on the biofilm growth environment and the bacterial genera, species, and strains involved (Archer et al., 2011). The organized biofilm communities, which can range from a single cell to a thick multicellular layer, have structural and functional heterogeneity (Costerton et al., 1999). The different structures are dependent on localized environmental conditions such as nutrition, waste, gas, and space limitations (Dunne W M, 2002). In certain embodiments, the biofilm is a single-species biofilm. In other embodiments, the biofilm is polymicrobial and comprising one or more strains of P. acnes bacteria and one or more strains of other non-P. acnes bacteria.

[0076] In certain embodiments, the one or more bacteriophage described herein is administered to treat acne in a subject and results in one or more symptoms or physical parameters of the condition or disorder to improve by at least about 10%, 20%, 30%, 40%, 50%, 60%, 70%, 80%, 90%, 95%, or more as compared to levels in an untreated or control subject. In some embodiments, the improvement is measured by comparing the symptom or physical parameter in a subject before and after administration of the bacteriophage. In some embodiments, the physical parameters tested include but are not limited to reduction in the number, percentage, and/or severity of non-inflammatory lesions, and reduction in the number, percentage, and/or severity of inflammatory lesions. In some embodiments, the physical parameters are assessed qualitatively by a certified clinician.

[0077] In some embodiments, the one or more bacteriophage described herein is administered to prevent or retard the development of biofilm comprising one or more P. acnes strains, in/on a subject's skin, a subject's eyes, teeth, or an implant inserted in a subject, and results in the one or more physical parameters on the skin, eyes, teeth, or implant to improve by at least about 10%, 20%, 30%, 40%, 50%, 60%, 70%, 80%, 90%, 95%, or more as compared to levels in an untreated or control subject. In some embodiments, the improvement is measured by comparing the physical parameter in a subject before and after administration of the bacteriophage. In some embodiments, the implant is inserted in a subject after it is pretreated with the one of more bacteriophage described herein.

[0078] The measurable physical parameter may be any suitable parameters known in the art, e.g., for biofilm formation and development (Tyner and Patel, 2016) or for implant-related infection. Biofilm formation and development parameters include but are not limited to assessment of microbial attachment, maturation and dispersion, and biofilm thickness. The biofilm formed in/on skin, teeth or an implant can be analyzed by scanning electron microscopy (EM) and by transmission EM (Holmberg et al., 2009) fluorescent in situ hybridization, immunofluorescent microscopy (Brandwein et al., 2016). In addition, biofilm formation on teeth include but are not limited to assessment of dental plaque. Implant-related infection parameters include but are not limited to detection of P. acnes in intraoperative tissue cultures. Tissue samples, aspirates and biopsy samples can be obtained from a patient and cultured in both agar plate and broth in aerobic and anaerobic conditions for greater than 5 days to optimize the sensitivity and specificity to detect P. acnes (Saper et al., 2015). A patient may present with clinical symptoms of P. acnes infection including but not limited to erythema, swelling, skin reaction, exudate production, pain, stiffness, and implant loosening.

[0079] Subjects in need of prevention or treatment may include individuals already having acne, as well as those at risk of having, or who may ultimately acquire acne. The need for prevention or treatment is assessed, e.g., by the presence of one or more risk factors associated with the development of acne, or the presence or progression of acne. For example, “preventing” or “treating” acne may encompass inhibiting the onset of associated symptoms, or reducing or eliminating associated symptoms, and does not necessarily encompass the elimination of the underlying disease etiology, e.g., genetic or environmental factors.

[0080] Subjects in need of prevention or treatment may also include individuals having biofilms comprising one or more P. acnes strains in/on their skin, eyes or teeth, as well as those at risk of having, or who may ultimately acquire biofilms comprising one or more P. acnes strains. The need for prevention or treatment is assessed, e.g., by the presence of one or more risk factors associated with the development of a biofilm, the presence or progression of a biofilm, or likely receptiveness to prevention of biofilm development in a subject or on an implant, or treatment of a subject having a biofilm. For example, “preventing” or “treating” the formation of a biofilm on skin may encompass reducing or eliminating associated symptoms of acne.

[0081] In some embodiments, a subject with acne is in remission and/or presently asymptomatic, and the bacteriophage described herein may be administered during the remission period to reduce the potential for a flare-up. In some embodiments, the individual in remission and/or presently asymptomatic for acne is undergoing treatment, e.g., antibiotics, anti-P. acnes agents, anti-comedonals, anti-inflammatories, anti-seborrhoeic agents, and/or anti-P. acnes vaccine, and the bacteriophage described herein may be co-administered with such treatment to reduce the potential for a flare-up.

[0082] As used herein, “P. acnes” (also known as Bacillus acnes, Corynebacterium acnes, Cutibacterium acnes or Corynebacterium parvumis) is a microaerophilic, anaerobic-aerotolerant Gram-positive, pleiomorphic rod-shaped bacterium that resides on the surface of and in the pilosebaceous follicles of the human skin, oral cavity, conjunctiva, intestinal tract and external ear canal belonging to the Propionibacteriaceae family (Perry and Lambert, 2011). In some embodiments, P. acnes refers to naturally occurring P. acnes. In some embodiments, P. acnes refers to naturally occurring, variant or mutant P. acnes (e.g., antibiotic resistant, phage resistant, nosocomial). In some embodiments, the variant or mutant P. acnes is resistant to at least 1, at least 2, at least 3, at least 4, or at least 5 antibiotics. In some embodiments, a mutant bacterial strain may arise in the presence of a bacteriophage and become resistant to said bacteriophage.

[0083] As used herein, a “strain” of bacteria refers to a genetic variant or subtype of bacteria. In some embodiments, a “strain” of bacteria comprises descendants from a single isolation in a pure culture of said bacteria. As used herein, a “strain” of bacteria may refer to one or more genetic variants or subtypes of said bacteria. For example, as used herein, a “strain” of P. acnes may refer to one or more genetic variants or subtypes of P. acnes, including but not limited to PA1 (ATCC 11828), PA2 (ATCC 33179), PA3 (ATCC 29399) PA4 (DSM 32714, deposited on Dec. 5, 2017), PA5 (ATCC 51277), PA6 (ATCC 6923), PA7 (ATCC 6922), PA8 (ATCC 6921), PA9 (ATCC 12930), PA10 (ATCC 6919), PA11 (ATCC 11827), PA13 (DSM 16379), PAP (DSM 32709, deposited on Dec. 5, 2017), B9 (DSM 32711, deposited on Dec. 5, 2017), PAC1, PAC2, PAC3, PAC5, PAC6, PA12, PAC13, PAC14, 2001-1, 2001-3, 2001-5, 2002-3, 2002-7, 2002-9, 2003-2, 2003-10, 2004-8_2, 2002-8_3, 2002-8_4, 2002-8_5, 2002-8_6, and 2002-8_10. Similarly, as used herein, a bacteriophage that is capable of lysing a “strain” of P. acnes refers to a bacteriophage that is capable of lysing one or more genetic variants or subtypes of P. acnes, including but not limited to PA1, PA2, PA3, PA4, PA5, PA6, PA7, PA8, PA9, PA10, PA11, PA13, PAP, B9, PAC1, PAC2, PAC3, PAC5, PAC6, PACT, PACE, PAC9, PAC10, PAC11, PAC12, PAC13, PAC14, 2001-1, 2001-3, 2001-5, 2002-3, 2002-7, 2002-9, 2003-2, 2003-10, 2004-8_2, 2002-8_3, 2002-8_4, 2002-8_5, 2002-8_6, and 2002-8_10.

[0084] In some embodiments, as used herein, a “mutant” bacterium refers to a bacterium that comprises greater than about 85%, greater than about 90%, greater than about 95%, greater than about 97%, or greater than about 99% homology to a corresponding wild-type bacterial strain.

[0085] As used herein, “bacteriophage” and “phage” are used interchangeably and refer to an isolated virus that is capable of infecting a bacterium. In some embodiments, the phage comprises a DNA or an RNA genome. A phage may be isolated from a natural or human-made environment. In some embodiments, the phage is selected from Siphoviridae. In some embodiments, the phage has a GC content of about 53% to about 55% (Marinelli L J 2012). In some embodiments, the genomic percentage identity between all P. acnes phages ranges from about 80% to 100%. As used herein, a “P. acnes bacteriophage” is intended to refer to a bacteriophage that is capable of lysing a P. acnes bacterium. For example, a “bacteriophage” used herein may refer to one or more genetic variants or subtypes of P. acnes bacteriophage including but not limited to PS7-1 (DSM xxxxx, deposited on Nov. 29, 2018), PAP-12 (DSM xxxxx, deposited on Nov. 29, 2018) PA1-13 (DSM xxxxx, deposited on Nov. 29, 2018), PA1-11 (DSM xxxxx, deposited on Nov. 29, 2018), PA1-12 (DSM xxxxx, deposited on Nov. 29, 2018), PA1-14 (DSM xxxxx, deposited on Nov. 29, 2018), PA2-4 (DSM xxxxx, deposited on Nov. 29, 2018), PA2-7 (DSM xxxxx, deposited on Nov. 29, 2018), PAP-1 (DSM xxxxx, deposited on Nov. 29, 2018, PAP-4 (DSM xxxxx, deposited on Nov. 29, 2018), PAP-11 (DSM xxxxx, deposited on Nov. 29, 2018), PAP-13 (DSM xxxxx, deposited on Nov. 29, 2018), PAP-14 (DSM xxxxx, deposited on Nov. 29, 2018), NS13 (DSM xxxxx, deposited on Nov. 29, 2018), NS7-1 (DSM xxxxx, deposited on Nov. 29, 2018), PA1-9 (DSM xxxxx, deposited on Nov. 29, 2018), PAP-7 (DSM xxxxx, deposited on Nov. 29, 2018), PAP-8 (DSM xxxxx, deposited on Nov. 29, 2018), NS19-1 (DSM xxxxx, deposited on Dec. 4, 2018), PA1-4 (DSM xxxxx, deposited on Dec. 4, 2018), PA2-13 (DSM xxxxx, deposited on Dec. 4, 2018).

[0086] It is known that different isolates of a given bacteriophage may vary at the nucleic acid sequence level. In some embodiments, bacteriophages are considered to be “functionally equivalent” as long as they exhibit identical lytic specificity. As used herein, the term “bacteriophage” encompasses a parent bacteriophage as well as its progeny or derivatives.

[0087] As used herein, “host range” refers to the bacteria that are susceptible to infection by a particular phage. The host range of a phage may include, but is not limited to, a strain, or a species. The term encompasses phage adsorbable, productive infections. In some embodiments, a phage may recognize two or more strains. In some embodiments, a phage may recognize wild-type and phage-resistant mutant strains.

[0088] Different phage isolates may be prepared and phenotyped using methods known in the art, e.g., a solid media assay, or liquid media assay. In some embodiments, the solid media assays to quantify and isolate phage are based on plaque assays (Abedon & Yin, 2009), ranging from efficiency of plating (EOP) (Kutter, 2009) to spot testing (Hyman & Abedon, 2010). In some embodiments, the plate format used for the plaque assay can be modified, e.g., from a petri dish to a 48-well plate.

[0089] In some embodiments, a double-layer plaque assay is used to phenotype bacteriophage isolates. For example, a starter culture of 4 mL BHIS may be inoculated with 5-10 colonies from a plate. This culture may be incubated overnight at 37° C. under anaerobic conditions. A volume of 100 μL of this culture may be mixed with 100 μL of a phage-containing sample (or medium only control) and incubated for 15 minutes. Thereafter, 3 mL of BHIS top agar (pre-molten 0.4% agar BHIS supplemented with 1 mM Ca²⁺ and Mg²⁺ ions) may be added, and the mixture may be poured over a BHIS bottom agar plate (1.5% agar BHIS). The plates may be allowed to gel at room temperature, and then incubated overnight at 37° C. under anaerobic conditions until plaques are identified.

[0090] In some embodiments, a modified spot drop assay is used to phenotype bacteriophage isolates. For example, a starter culture of 4 mL BHIS may be inoculated with 5-10 colonies from a plate. This culture may be incubated at 37° C., anaerobically. At this stage, 10 μL of samples containing phage or media only controls may be dropped in the middle of the well, left to absorb, and then may be incubated overnight (37° C., anaerobically) until plaques are visible for counting.

[0091] In some embodiments, a liquid media assay is used to phenotype the bacteriophage. In some embodiments, liquid-based phage infection assays follow the time-course of infection and can provide more than quantitative end-points of infection as compared to the solid-phase plaque assays. In some embodiments, by mixing phage with bacteria in liquid medium, then following the turbidity of the culture over time, one can discern finer differences (e.g., a delay in the time of cell lysis) between how different bacterial strains interact with the phage. In some embodiments, the liquid media assay allows for high-throughput measurements by using 96-well plates and reading optical density in a plate reader.

[0092] For example, a bacterial strain may be grown for overnight, then diluted 1:10 and further grown until an OD₆₀₀ of about 0.4-0.8. This culture may then be diluted using BHIS medium to a starting optical density, typically between 0.05 and 0.2 OD₆₀₀. A volume of 200 μL of culture may then be dispensed into the wells of a Nunclon flat-bottomed 96-well plate. 10 μL of a sample containing phage or 10 μL of medium as control may be added to each well. The wells may be covered with 50 μL of mineral oil to limit evaporation, and a thin sterile optically transparent polyester film may be added to keep the culture sterile. Optical density measurements may be carried out every 15 minutes, e.g., in a Tecan Infinite M200 plate reader connected to a Tecan EVO75 robot. Between measurements, the plate may be incubated while shaking at 37° C., e.g., inside the EVO75 incubator.

[0093] In some embodiments, infectivity is determined by the plaque presence in a solid assay only. In some embodiments, infectivity is determined by the decrease in the bacterial culture optical density in a liquid assay only. In some embodiments, infectivity is determined by the decrease in the bacterial culture optical density and plaque presence in both the liquid assay and the solid assay.

[0094] As used herein, a “lytic” bacteriophage refers to a virulent bacteriophage that attaches to a bacterial host and inserts its genetic material into the bacterial host cell. After that a phage usually follows one of two life cycles, lytic (virulent) or lysogenic (temperate). Lytic phages take over the machinery of the cell to make phage components. They then destroy, or lyse, the cell, releasing new phage particles. See, e.g., Abedon et al., 2011; Sulakvelidze et al., 2001. As used herein, “lysis” refers to a detectable amount of infection.

[0095] In some embodiments, the % lysis is measured by methods known in the art and described herein, e.g., by optical density (OD).

[0096] As used herein, “% homology” refers to the level of nucleic acid sequence identity or amino acid sequence identity between a first nucleic acid or amino acid sequence when aligned to a second nucleic acid or amino acid sequence using a sequence alignment program. When a position in the first and the second sequences is occupied by the same nucleic acid or amino acid (e.g., if a position in the first nucleic acid sequence and the second nucleic acid sequence is occupied by cytosine), then the first and the second sequences are homologous at that position.

[0097] In general, homology between two sequences is calculated from the number of matching or homologous positions shared by the two sequences over the total number of positions compared. In some embodiments, the first and the second sequences are aligned in a manner to maximize % homology. In some embodiments, % homology refers to the % identity over the shorter of two sequences. In some embodiments, the % homology for a nucleic acid sequence includes intronic and/or intergenic regions. Exemplary levels of % homology include, but are not limited to, 80, 81, 82, 83, 84, 85, 86, 87, 88, 89, 90, 91, 92, 93, 94, 95, 96, 97, 98, 99% or more sequence identity between a first and a second sequence.

[0098] Exemplary sequence alignment programs that may be used to determine % homology between two sequences include, but are not limited to, the FASTA package (including rigorous (SSEARCH, LALIGN, GGSEARCH and GLSEARCH) and heuristic (FASTA, FASTX/Y, TFASTX/Y and FASTS/M/F) algorithms, the EMBOSS package (Needle, stretcher, water and matcher), the BLAST programs (including, but not limited to BLASTN, BLASTX, TBLASTX, BLASTP, TBLASTN), MEGABLAST and BLAT. In some embodiments, the sequence alignment program is BLASTN. For example, 95% homology refers to 95% sequence identity determined by BLASTN, by combining all non-overlapping alignment segments (BLAST HSPs), summing their numbers of identical matches and dividing this sum with the length of the shorter sequence.

[0099] In some embodiments, the sequence alignment program is a basic local alignment program, e.g., BLAST. In some embodiments, the sequence alignment program is a pairwise global alignment program. In some embodiments, the pairwise global alignment program is used for protein-protein alignments. In some embodiments, the pairwise global alignment program is Needle. In some embodiments, the sequence alignment program is a multiple alignment program. In some embodiments, the multiple alignment program is MAFFT. In some embodiments, the sequence alignment program is a whole genome alignment program. In some embodiments, the whole genome alignment is performed using BLASTN. In some embodiments, BLASTN is utilized without any changes to the default parameters.

[0100] As used herein, a “composition” refers to a preparation of the bacteriophage of the disclosure with other components such as a physiologically acceptable carrier and/or excipient. In some embodiments, the composition is a pharmaceutical composition. In some embodiments, the composition is a cosmetic composition.

[0101] “Physiologically acceptable carrier” is used herein to refer to a pharmaceutically or cosmetically acceptable carrier or a diluent that does not cause significant irritation to an organism and does not abrogate the biological activity and properties of the administered bacteriophage composition. An adjuvant is included under these phrases.

[0102] The term “excipient” refers to an inert substance added to a pharmaceutical composition or a cosmetic composition to further facilitate administration of an active ingredient. Examples of excipients for pharmaceutical compositions of the application include, but are not limited to, calcium bicarbonate, calcium phosphate, various sugars and types of starch, cellulose derivatives, gelatin, vegetable oils, polyethylene glycols, silicone-based excipients, DMSO, antioxidants, including, e.g., BHT, BHA, a-tocopherol, preservatives, including methylparaben and propylparaben and benzoic acid, waxes, including, e.g., cetyl esters wax, stearic acid and cetyl alcohol, humectants, including e.g., propylene glycol, glycerin, sorbitol, urea, alpha hydroxyacids, cosolvents, including e.g., glycerin, propylene glycol, and ethanol., enhancers, including e.g., water, surfactant, and propylene glycol, and surfactants, including, e.g., polysorbate 20, Triton X-100, polysorbate 80, polyoxyethylene sorbitan, fatty acid esters, different poloxamers, polyoxyl-40-stearate and other polyoxyethylene stearates, glycerol monostearate, macrogol-8-stearat, macrogol cetostearylether 20 and polyoxyethylene alkyl ethers, sorbitan monostearate and other sorbitan monoesters, polyoxyethylene castor oil derivatives, sodium lauryl sulfate, cetylpyridinium chloride, thickeners and gelling agents, including, e.g., dextran 40, dextran 70, carbomer 940, carbomer 974 and other polyacrylic acid derivates, dextrin, maltodextrin, polyvinyl alcohol, polyethylene glycol and agar. Examples of excipients for cosmetic compositions include, but are not limited to, water, oils, fats, waxes, humectants, surfactants, preservatives, perfumes and colors, herbal or plant material, functional raw material, natural surface acting agents/emulsifiers, and other cosmetically acceptable carriers or agents. See, for example, Harry's Cosmeticology, 9^{th} Ed. In some embodiments, the natural surface acting agent or emulsifier, includes, e.g., fermentation-derived glycolipids including but not limited to rhamnolipids and sophorolipids; plant derived alkyl polyglucosides including but not limited to sodium cocoyl isethionate, decyl glucoside, lauryl glucoside, coco-glucoside, and cocoamidopropyl betaine; fatty acid amides including but not limited to cocamide monoethanolamine; and phospholipids.

[0103] The terms “therapeutically effective dose” and “therapeutically effective amount” are used to refer to an amount of a compound that results in prevention, delay of onset of symptoms, or amelioration of symptoms of acne compared to an untreated control, or compared in a subject before and after administration of the bacteriophage. A therapeutically effective amount may, for example, be sufficient to treat, prevent, reduce the severity, delay the onset, and/or reduce the risk of occurrence of one or more symptoms of acne compared to an untreated control. The terms “therapeutically effective dose” and “therapeutically effective amount” are also used to refer to an amount of a compound that results in the prevention of the development of a biofilm comprising one or more P. acnes strains in/on skin, eyes, teeth, or on an implant. A therapeutically effective amount may, for example, be sufficient to prevent, reduce the severity, delay the onset, and/or reduce the risk of developing a biofilm with one or more strains of P. acnes, compared to an untreated control.

[0104] As used herein, “plaque forming units” are used to refer to the phage titer that is a quantitative measurement of the biological activity of the phage and is expressed as plaque forming units (PFU) per ml. In some embodiments, a PFU is also referred to as a unit of activity.

[0105] As used herein, “skin” refers to the organ of the integumentary system that forms the soft outer tissue covering mammals. It encompasses multiple layers of ectodermal tissue, and guards the underlying muscles, bones, ligaments and internal organs. It encompasses the epidermis, the basement membrane, the dermis and the hypodermis. The epidermis further comprises the Stratum corneum, Stratum lucidum (only in palms and soles), Stratum granulosum, stratum spinosum, Stratum germinativum (or Stratum basale). The dermis further comprises the papillary region, and the reticular region. The hypodermis further comprises the deeper subcutaneous tissue made of fat and connective tissue. Bacteria can be found throughout the skin.

[0106] As used herein, “implant” refers to a medical prosthesis or cosmetic device manufactured to replace a missing biological structure, support a damaged biological structure, or enhance an existing biological structure. It encompasses sensory or neurological implants, cardiovascular medical devices, orthopedic implants or biomaterials, contraceptive implants, cosmetic implants, dental implants, prosthetic devices, or implants for organ dysfunction. “Implant” further comprises devices such as an intraocular lens, contact lens, scleral buckle, conjunctival plug, lacrimal intubation device, orbital implant, suture material, intrastromal corneal ring segment, intrastromal corneal ring segment, cochlear implant, tympanostomy tube, a neurostimulator, an artificial heart, artificial heart valve, implantable cardioverter-defibrillator, cardiac pacemaker, a coronary stent, a pin, rod, screw, plate, metallic glass, a biodegradable medical implant, a copper- or hormone-based intrauterine device, a breast implant, shoulder implant, nose prosthesis, ocular prosthesis, the LINX, implantable gastric stimulator, diaphragmatic/phrenic nerve stimulator, neurostimulator, surgical mesh, or penile prosthesis. An implant can be used in conditions including but not limited to cataract, glaucoma, keratoconus, visual impairments, otosclerosis, hearing loss impairments, otitis media, middle ear diseases, epilepsy, Parkinson's disease, treatment-resistant depression, heart failure, cardiac arrhythmia, ventricular tachycardia, valvular heart disease, angina pectoris, atherosclerosis, bone fractures, osteoarthritis, scoliosis, spinal stenosis, chronic pain, preventing an unintended pregnancy, menorrhagia, polycystic ovarian syndrome, mastectomy, augmentation of the buttock, augmentation of the chin, gastroesophageal reflux disease, gastroparesis, respiratory failure, sleep apnea, urinary and fecal incontinence, and erectile dysfunction.

[0107] “Administering” or “administration of” a substance, a compound, a composition, a formulation or an agent to a subject can be carried out using one of a variety of methods known to those skilled in the art. For example, a compound or an agent can be administered topically, by applying on the skin, teeth, eyes or on parts of eyes including but not limited to the lens capsule and the corneal stroma. For example, the composition may be in a form suitable for topical administration and be in the form of a cream, paste, solution, powder, spray, aerosol, capsule, eye drop, eye ointment, eye lotion, solid or gel, or may be bonded to a solid surface. The composition may also form part of a face wash, soap, application stick, cosmetic or dressing. Administering can also be performed, for example, once, a plurality of times, and/or over one or more extended periods. In some aspects, the administration includes both direct administration, including self-administration, and indirect administration, including the act of prescribing a formulation. For example, as used herein, a physician who instructs a patient to self-administer a formulation, or to have the formulation administered by another and/or who provides a patient with a prescription for a formulation is administering the formulation to the patient.

[0108] “Pretreatment of” an implant with a substance, a compound, a composition, a formulation or an agent can be carried out using one of a variety of methods known to those skilled in the art. For example, the implant may be coated with a formulation described herein, along with an antimicrobial substance, a hydrophilic polymer coating, a polymer brush coating, or a contact-killing surface coating, to avoid colonization of the surface by P. acnes bacteria, thereby reducing the risk of biofilm formation and clinical infections. In some embodiments, the implant is impregnated with an antimicrobial substance. In some embodiments, the formulation described herein is removed from the surface of an implant prior to insertion within the human body.

[0109] All ranges include end points. All references cited are incorporated for any purpose (specification controls where there are inconsistencies). Singular form includes plural.

[0110] Each embodiment described herein may be used individually or in combination with any other embodiment described herein.

### Bacteriophage

[0111] The bacteriophage described herein is capable of lysing one or more P. acnes bacterial strains that are generally thought to be associated with acne, e.g., acne vulgaris, acne conglobata, acne fulminans, Hidradentis suppurativa, scalp acne, acne associated with Progressive Macular Hypomelanosis, acne associated with SAPHO syndrome or acne associated with Fatal Bacterial Granuloma after Trauma. In some embodiments, the bacteriophage is capable of lysing one or more P. acnes bacterial strains that are generally thought to be associated with acne. In some embodiments, the bacteriophage is capable of lysing one or more P. acnes bacterial strains that are associated with biofilms. In some embodiments, the bacteriophage is capable of modulating acne by lysing the one or more P. acnes bacteria in a mammal. In some embodiments, the bacteriophage is capable of modulating acne by lysing the one or more P. acnes bacteria in/on the skin, eyes or teeth of a mammal. In some embodiments, the bacteriophage is capable of modulating P. acnes-associated biofilm formation by lysing the one or more P. acnes bacteria in/or the skin, the eyes, the teeth, or on the implant inserted in a mammal.

[0112] In some embodiments, the composition comprises at least one bacteriophage selected from PS7-1, NS19-1, and homologs thereof that have the same lytic specificity as PS7-1, and NS19-1. In some embodiments, the homolog comprises at least about 89%, at least about 90%, at least about 95%, at least about 97%, or at least about 99% homology to the sequence of at least one of PS7-1 and NS19-1 as measured by BLASTN. The bacteriophages identified in this paragraph are referred to as “Cluster 1a” bacteriophage and are capable of infecting P. acnes strain B9, and the bacterial strains described herein, see, e.g., FIG. 1, FIG. 2, and FIG. 4.

[0113] In some embodiments, the composition comprises at least one bacteriophage selected from NS13, and homologs thereof that have the same lytic specificity as NS13. In some embodiments, the homolog comprises at least about 89%, at least about 90%, at least about 95%, at least about 97%, or at least about 99% homology to the sequence of NS13 as measured by BLASTN. The bacteriophages identified in this paragraph are referred to as “Cluster 1b” bacteriophage and are also capable of infecting P. acnes strain B9, and the bacterial strains described herein, but show no lytic specificity with respect to certain strains (i.e., PA1, PA3, PA4, PA5, PA6, PA9, PA10, and PA11) as compared to Cluster 1a bacteriophage, see, e.g., FIG. 1, and FIG. 2.

[0114] In some embodiments, the composition comprises at least one bacteriophage selected from PA1-13, and homologs thereof that have the same lytic specificity as PA1-13. In some embodiments, the homolog comprises at least about 89%, at least about 90%, at least about 95%, at least about 97%, or at least about 99% homology to the sequence of PA1-13 as measured by BLASTN. The bacteriophages identified in this paragraph are referred to as “Cluster 2” bacteriophage and are capable of infecting P. acnes strain PA3, and the bacterial strains described herein (i.e. PA1, PA2, PAP, PA5, PA6, PA7, PA8, PA9, PA10, and PA11), and incapable of infecting strain PA4 efficiently (i.e., at greater than + level) see, e.g., FIG. 1, and FIG. 2.

[0115] In some embodiments, the composition comprises at least one bacteriophage selected from PAP-12, and homologs thereof that have the same lytic specificity as PAP-12. In some embodiments, the homolog comprises at least about at least about 85%, at least about 87%, at least about 90%, at least about 95%, at least about 97%, or at least about 99% homology to the sequence of PAP-12 as measured by BLASTN. The bacteriophages identified in this paragraph are referred to as “Cluster 3a” bacteriophage and are capable of infecting the bacterial strains described herein (i.e. PA1, PA2, PA3, PAP, PA6, PA7, PA8, PA9, PA10, and PA11), capable of infecting strain PA4 efficiently, and incapable of infecting strain PA5 efficiently (i.e., at greater than + level) see, e.g., FIG. 1, and FIG. 2.

[0116] In some embodiments, the composition comprises at least one bacteriophage selected from PA1-12, PA1-9, PAP-14, PAP-6, PAP-1, and homologs thereof that have the same lytic specificity as PA1-12, PA1-9, PAP-14, PAP-6 and PAP-1. In some embodiments, the homolog comprises at least about 85%, at least about 87%, at least about 90%, at least about 95%, at least about 97%, or at least about 99% homology to the sequence of at least one of PA1-12, PA1-9, PAP-14, PAP-6, and PAP-1 as measured by BLASTN. The bacteriophages identified in this paragraph are referred to as “Cluster 3b” bacteriophage and are capable of infecting the bacterial strains described herein, and incapable of infecting strain PA4 efficiently (i.e., at greater than + level), see, e.g., FIG. 1, FIG. 2, and FIG. 4.

[0117] In some embodiments, the composition comprises at least one bacteriophage selected from PA2-13, PAP-8, PA1-11, PAP-13, PA2-7, PAP-11, PA1-14, PAP-7, NS7-1, PA2-4, PAP-4, and homologs thereof that have the same lytic specificity as PA2-13, PAP-8, PA1-11, PAP-13, PA2-7, PAP-11, PA1-14, PAP-7, NS7-1, PA2-4, and PAP-4. In some embodiments, the homologs comprise at least about 88%, at least about 90%, at least about 95%, at least about 97%, or at least about 99% homology to the sequence of at least one of one or more of PA2-13, PAP-8, PA1-11, PAP-13, PA2-7, PAP-11, PA1-14, PAP-7, NS7-1, PA2-4, and PAP-4 as measured by BLASTN. The bacteriophages identified in this paragraph are referred to as “Cluster 4” bacteriophage and are incapable of infecting P. acnes strains B9 and PA4, and capable of infecting the bacterial strains described herein, see, e.g., FIG. 1, FIG. 2, and FIG. 4.

[0118] In some embodiments, the composition comprises at least one bacteriophage selected from PA1-4, and homologs thereof that have the same lytic specificity as PA1-4. In some embodiments, the homologs comprise at least about 88%, at least about 90%, at least about 95%, at least about 97%, or at least about 99% homology to the sequence of at least one of one or more of PA1-4 as measured by BLASTN. The bacteriophages identified in this paragraph are referred to as “Cluster 5” bacteriophage and are capable of infecting strains B9 and PA4, as well as other bacterial strains described herein, incapable of infecting strain PA5 efficiently (i.e., at greater than + level), and incapable of infecting PA3, see, e.g., FIG. 1, FIG. 2, and FIG. 4.

[0119] In some embodiments, during phage infection, mutant bacterial strains arose that are resistant to the phage. In some embodiments, it is beneficial for a phage to target the mutant bacteria. In order to identify said phage, in some embodiments, bacteria are incubated with a phage, see, e.g., FIG. 4, in order to first generate mutant bacterial strains that can survive such infection. Different phages are then tested on the resulting mutant bacteria to identify phage that can lyse such mutant bacterial cells. Exemplary mutant B9 strain is described herein. See, e.g., FIG. 4. In some embodiments, the mutant bacterial strain minors mutations that are likely to occur in vivo when a subject is treated with the phage disclosed herein. In some embodiments, a bacteriophage may be generated that is capable of infecting and lysing both the original bacterial strain and the mutant bacterial strain that arose therefrom. Thus, in some embodiments, the bacteriophages provided herein are capable of treating unmodified PA3 bacteria, as well as resistant B9 mutant bacteria.

[0120] In some embodiments, the bacteriophage is capable of infecting P. acnes B9 strain and at least one bacteria, at least two bacteria, at least three bacteria, at least four bacteria, or at least five bacteria, at least six bacteria, at least seven bacteria, at least eight bacteria, at least nine bacteria, or at least ten bacteria selected from PA1, PA2, PA5, PA6, PA7, PA8, PA9, PA10, PA11, and PAP. See, e.g., FIG. 1 and FIG. 4.

[0121] In some embodiments, the bacteriophage is capable of infecting P. acnes strain PA4, and at least one bacteria, at least two bacteria, at least three bacteria, at least four bacteria, or at least five bacteria, at least six bacteria, at least seven bacteria, at least eight bacteria, at least nine bacteria, or at least ten bacteria selected from PA1, PA2, PA3, PA6, PA7, PA8, PA9, PA10, PA11, and PAP. See, e.g., FIG. 1.

[0122] In some embodiments, the bacteriophage is incapable of infecting strain B9 and strain PA4, but is capable of infecting at least one bacteria, at least two bacteria, at least three bacteria, at least four bacteria, or at least five bacteria, at least six bacteria, at least seven bacteria, or at least eight bacteria selected from PA1, PA2, PA3, PA6, PA7, PA8, PA10, and PAP. See, e.g., FIG. 1 and FIG. 4.

[0123] As used herein, a “mixture” of lytic bacteriophage refers to a composition comprising at least two different isolates of lytic bacteriophage as described herein. As used herein, “a” or “one” bacteriophage refers to an isolate or type of bacteriophage and is not necessarily intended to refer to a single bacteriophage particle.

[0124] In some embodiments, the mixture comprises a least one phage that is capable of infecting P. acnes strain B9 and at least one phage that is capable of infecting P. acnes strain PA4. In some embodiments, the mixture comprises a least one phage that is capable of infecting P. acnes strain B9 and at least one phage that is capable of infecting P. acnes strain PA3. In some embodiments, the mixture comprises a least one phage that is capable of infecting P. acnes strain B9 and at least one phage that is capable of infecting P. acnes strain PA5. In some embodiments, the mixture comprises a least one phage that is capable of infecting P. acnes strain PA4 and at least one phage that is capable of infecting P. acnes strain PA3. In some embodiments, the mixture comprises a least one phage that is capable of infecting P. acnes strain PA4 and at least one phage that is capable of infecting P. acnes strain PA5. In some embodiments, the mixture comprises a least one phage that is capable of infecting P. acnes strain PA3 and at least one phage that is capable of infecting P. acnes strain PA5.

[0125] In some embodiments, a mixture comprising at least two phages reduces the time to appearance of phage-resistant bacteria as compared to a single phage. See FIG. 9.

[0126] In some embodiments, a mixture comprising at least three phages widens the host range as compared to two phages. In some embodiments, the mixture comprises at least one phage that is capable of infecting P. acnes strain B9, at least one phage that is capable of infecting P. acnes strain PA3, and at least one phage that is capable of infecting P. acnes strain PA4. The ability to infect B9, PA3 and PA4 can also be a property of certain bacteriophage mixtures comprising at least 2 phage (e.g., at least PAP-12 and any one of NS19-1, PS7-1, or PA1-4; at least PA1-4 and any one of NS7-1, PA1-9, PA1-14, PA2-7, PAP-1, PAP-4 or PAP-12),

### Bacterial Lysis

[0127] In some embodiments, the P. acnes bacteria to be lysed by the bacteriophage provided herein are in/on the skin, eyes or teeth. In some embodiments, the P. acnes bacteria to be lysed by the bacteriophage provided herein are in a biofilm in/on skin, eyes, teeth, or on an implant.

[0128] In some embodiments, the bacteriophage provided herein is capable of lysing P. acnes bacteria that are generally thought to be associated with acne and/or biofilms and may be administered to ameliorate the condition or at least one symptom thereof

### Cosmetic Compositions

[0129] Cosmetic compositions comprising the bacteriophage described herein may be used to modulate acne and/or biofilms. Cosmetic compositions comprising one or more bacteriophage, alone or in combination with prophylactic agents, therapeutic agents, and/or and cosmetically acceptable carriers are provided. In certain embodiments, the cosmetic composition comprises two bacteriophages described herein. In other embodiments, the cosmetic composition comprises three or more bacteriophages described herein.

[0130] The cosmetic compositions described herein may be formulated in a conventional manner using one or more cosmetically acceptable carriers comprising excipients and auxiliaries, which facilitate processing of the active ingredients into compositions for cosmetic use. Methods of formulating cosmetic compositions are known in the art (see, e.g., “Harry's Cosmeticology, Chemical Publishing Company 9^{th} Ed; Cosmetics: Science and Technology Series: Edward Sagarin, Interscience Publishers). In some embodiments, the cosmetic compositions are subjected to appropriate formulation for topical administration, including but not limited to methods of manufacturing a gel, cream, lotion, face powder and compacts, skin colorant, body powder, face pack and masks, bath oil, bath powder, bath foam, astringent lotion, antiperspirant, preshave and after shave lotion, or cologne. The composition may be administered once or more daily, weekly, or monthly.

### Pharmaceutical Compositions

[0131] Pharmaceutical compositions comprising the bacteriophage described herein may be used to modulate acne and/or biofilms. Pharmaceutical compositions comprising one or more bacteriophage, alone or in combination with prophylactic agents, therapeutic agents, and/or and pharmaceutically acceptable carriers are provided. In certain embodiments, the pharmaceutical composition comprises two bacteriophages described herein. In other embodiments, the pharmaceutical composition comprises three or more bacteriophages described herein.

[0132] The pharmaceutical compositions described herein may be formulated in a conventional manner using one or more physiologically acceptable carriers comprising excipients and auxiliaries, which facilitate processing of the active ingredients into compositions for pharmaceutical use. Methods of formulating pharmaceutical compositions are known in the art (see, e.g., “Remington's Pharmaceutical Sciences,” Mack Publishing Co., Easton, Pa.). In some embodiments, the pharmaceutical compositions are subjected to appropriate formulation for topical administration, including but not limited to methods of manufacturing a gel, cream, paste, ointment, solution, microemulsion, lotion, liquid wash, spray, application stick, cosmetic, dressing, face-wash, soap, powder, spray, capsule, eye drop, eye ointment, eye lotion, solid, a moist sponge wipe or a composition bonded to a solid surface.

[0133] The bacteriophage described herein may be formulated into pharmaceutical compositions in any suitable topical dosage form (e.g., a gel, cream, paste, ointment, solution, microemulsion, lotion, liquid wash, spray, application stick, cosmetic, dressing, face-wash, soap, powder, spray, capsule, eye drop, eye ointment, eye lotion, solid, a moist sponge wipe or may be bonded to a solid surface.) and for any suitable type of administration (e.g., immediate-release, pulsatile-release, delayed-release, extended-release or sustained release). In some embodiments, the bacteriophages are formulated for administration as a gel, cream, paste, ointment, solution, microemulsion, lotion, liquid wash, spray, application stick, cosmetic, dressing, face-wash, soap, powder, spray, capsule, eye drop, eye ointment, eye lotion, solid, a moist sponge wipe or may be bonded to a solid surface. The composition may be administered once or more daily, weekly, or monthly.

[0134] In some embodiments, the bacteriophage may be covalently attached to a carrier particle, for use as a topical formulation or for application to an implant. In some embodiments, the carrier particle is typically approximately spherical, may have an average diameter of up to 20 microns, up to 15 microns, up to 10 microns, from 0.1 microns, from 0.5 microns or any combinations of these—e.g. from 0.1 microns to 20 microns or from 0.5 microns to 10 microns. The particles in general can be approximately round or spheroid; they are preferably smooth, especially for use on sensitive parts of the body. Particle size is suitably measured using methods and apparatus recognized as standard in the art. Particle sizing in dispersions can be accomplished using a variety of techniques, including laser diffraction, dynamic light scattering (DLS), disc centrifugation, and light microscopy. Examples of sizing equipment are made by Malvern Instruments (UK), using laser diffraction methods. In some embodiments, bacteriophages may be covalently attached to a plurality of particles. These are preferably in relatively homogenous form, in which a large proportion of the plurality of particles have diameters of up to 20 microns, up to 15 microns, up to 10 microns, from 0.1 microns, from 0.5 microns or any combinations of these—e.g. from 0.1 microns to 20 microns or from 0.5 microns to 10 microns. In some embodiments, 80% or more, 90% or more or 95% or more of the particles with phage covalently attached have diameters of up to 20 microns, up to 15 microns, up to 10 microns, from 0.1 microns, from 0.5 microns or any combinations of these—e.g. from 0.1 microns to 20 microns or from 0.5 microns to 10 microns. WO2015118150 describes further the carrier particle that may be used for the bacteriophage formulation.

[0135] Particles for use in the application to which bacteriophage are immobilized by covalent bonding are generally substantially inert to the animal to be treated. In examples, nylon particles (beads) were used. Other inert, preferably non-toxic biocompatible material may be used. In addition, the particle may be made of a biodegradable material. Suitable materials include polymethyl methacrylate, polyethylene, ethylene/acrylate copolymer, nylon-12, polyurethane, silicone resin, silica and nylon 1010. WO2003093462 describes further materials that the particles may be made from.

[0136] Immobilization or attachment of bacteriophage to the particle substrate may be achieved by covalent bonds formed between the bacteriophage coat protein and the carrier substrate. Bacteriophage may also be immobilized to the substrate via their head, tail, or capsule by activating the substrate particle before the addition and bonding of bacteriophage. The term “activated/activating/activation” refers to the activation of the substrate such as electrically, e.g. by corona discharge, or by reacting said substrate with various chemical groups (leaving a surface chemistry able to bind viruses, such as bacteriophage head, tail or capsule group). WO2015118150, WO2003093462 and WO2007072049 describe further the activation of said substrate, coupling of phage to substrate, and details of methods for covalent attachment of phage to particles.

[0137] In some embodiments, the bacteriophage is formulated for delivery to mammalian skin, eyes, teeth, or implant. In some embodiments, the composition comprises the bacteriophage and a pharmaceutically or cosmetically acceptable excipient, wherein the bacteriophage and the excipient do not occur together in nature. In some embodiments, the composition comprises the bacteriophage and a pharmaceutically or cosmetically acceptable excipient, wherein the excipient is a non-naturally occurring excipient. In some embodiments, the composition comprises the bacteriophage encapsulated in a pharmaceutically or cosmetically acceptable polymer, wherein the polymer is a non-naturally occurring polymer. In some embodiments, the composition described herein may be encapsulated to facilitate a longer shelf life and storage of phage to ensure reproducible dosages, and to facilitate effective delivery to the desired site of action or adsorption. In some embodiments, the composition may be encapsulated in emulsions, ointments, polymeric or lipid microparticles (microspheres & microcrystals), nanoparticles, nanofibers, microfibers, membranes, thin film structures and/or liposomes. Natural and synthetic polymers may be used for phage encapsulation. Phage encapsulation may be performed using a variety of hydrophilic and hydrophobic polymers including but not limited to agarose, alginate, chitosan, pectin, whey protein, gelled milk protein, hyaluronic acid methacrylate, hydroxypropyl methyl cellulose (HPMC), poly(N-isopropylacrylamide), Poly(DL-lactide:glycolide), polyesteramide, polyvinyl pyrrolidone, polyethylene oxide/polyvinyl alcohol, cellulose diacetate, and/or polymethyl methacrylate. Examples of the materials that could be used for preparation of phages encapsulated in liposomes include, but are not limited to, phosphatidylcholine, cholesterol, Softisan 100™; soybean phosphatidylcholine, DOPC (1,2-dioleoyl-sn-glycero-3-phosphocholine), DOPS (1,2-dioleoyl-sn-glycero-3-phospho-L-serine), DLPC (1,2-Dilauroyl-sn-glycero-3-phosphorylcholine), Cholesterol-PEG 600, and/or cholesteryl esters. Solid-liquid particles for topical administration can be produced by solid lipids and adjuvants including, but not limited to, surfactants and emulsifiers, e.g., stearic acid, oleic acid, tripalmitin, cetyl alcohol, cetyl palmitate, tristearin, trimyristin, and hydrogenated vegetable fat (HVF), glyceryl behenate, glyceryl monostearate, glyceryl palmitostearate, glyceryl tripalmitate, sodium taurocholate, octadecyl alcohol, Tween 80, Poloxamer 188, Compritol® 888 ATO, Imwitor® 900, Precirol® ATO5, carnauba wax and isodecyl oleate, hydrogenate phosphatidylcholine, cholesterol. Malik et al., 2017; Bacteriophages Methods and Protocols 2018; and Das and Chaudhury, 2011 describe further materials and techniques for bacteriophage encapsulation.

[0138] In some embodiments, the composition is in single dosage form. Single dosage forms may be in a liquid, gel or cream form. Single dosage forms may be administered directly to a patient without modification or may be diluted or reconstituted prior to administration. Single dosage forms of the composition may be prepared by portioning the composition into smaller aliquots, single dose containers, single dose liquid forms, or single dose solid forms, such as tablets, granulates, nanoparticles, nanocapsules, microcapsules, microtablets, pellets, or powders. A single dose in a solid form may be reconstituted by adding liquid, typically sterile water or saline solution, or mixing with other dermal formulation components, prior to administration to a patient.

[0139] Dosage regimens may be adjusted to provide a therapeutic response. Dosing can depend on several factors, including severity and responsiveness of the disease, route of administration, time course of treatment (days to months to years), and time to amelioration of the condition. For example, a single bolus may be administered at one time, several divided doses may be administered over a predetermined period of time, or the dose may be reduced or increased as indicated by the therapeutic situation.

[0140] In some embodiments, the ingredients are supplied either separately or mixed together in unit dosage form. The pharmaceutical compositions may be packaged in a hermetically sealed container such as an ampoule or sachet indicating the quantity of the agent. In some embodiment, one or more of the pharmaceutical compositions is supplied as a dry sterilized lyophilized powder or water-free concentrate in a hermetically sealed container and can be reconstituted (e.g., with water or saline) to the appropriate concentration for administration to a subject. In some embodiments, one or more of the prophylactic or therapeutic agents or pharmaceutical compositions is supplied as a dry sterile lyophilized powder in a hermetically sealed container and reconstituted prior to administration. In some embodiments, the dry sterilized lyophilized powder is produced by spray-drying and can include a mixture of one of the following: 30-50% dextran, 40-70% sucrose, 0.5-2% tris, and 1-3% leucin; or 30-50% hydroxyethyl starch, 40-70% sucrose, 0.5-2% tris, and 1-3% leucine. Cryoprotectants can be included for a lyophilized dosage form, principally 0-10% sucrose (optimally 0.5-1.0%). Other suitable cryoprotectants include trehalose and lactose. Other suitable bulking agents include glycine and arginine, either of which can be included at a concentration of 0-0.05%, and polysorbate-80 (optimally included at a concentration of 0.005-0.01%). Additional surfactants include but are not limited to polysorbate 20 and BRIJ surfactants.

### Methods of Treatment

[0141] Methods of treating acne in a mammal using a bacteriophage, a bacteriophage mixture, and/or a composition comprising a bacteriophage or a bacteriophage mixture are provided. In some embodiments, a method of treating acne comprises administering to a subject the P. acnes bacteriophage described herein. In some embodiments, a method of treating or preventing acne comprises administering to a subject the P. acnes bacteriophage described herein. In some embodiments, a method of reducing the amount of P. acnes comprises administering to a subject the P. acnes bacteriophage described herein. In some embodiments, a method of treating or preventing the development of biofilms in/on skin, eyes or teeth comprises administering to a subject the P. acnes bacteriophage described herein. In some embodiments, a method of preventing the development of biofilms on implants comprises administering to a subject the P. acnes bacteriophage described herein.

[0142] In some embodiments, a method of treating acne comprises administering to a mammal determined to have a skin disease associated with one or more strains of P. acnes bacteria, the bacteriophage mixture, and/or the composition comprising a bacteriophage mixture described herein. In some embodiments, a method of preventing acne comprises administering to a mammal at risk of acquiring a skin disease associated with one or more strains of P. acnes bacteria, the bacteriophage mixture, and/or the composition comprising a bacteriophage mixture described herein. In some embodiments, a method of treating biofilms comprises administering to a mammal determined to have a skin disease associated with one or more strains of P. acnes bacteria, the bacteriophage mixture, and/or the composition comprising a bacteriophage mixture described herein. In some embodiments, a method of preventing biofilms on implants comprises applying on the implant at risk of being colonized with P. acnes bacteria, the bacteriophage mixture, and/or the composition comprising a bacteriophage mixture described herein.

[0143] In some embodiments, the bacteriophage and the method of treatment is used prophylactically. For example, the method comprises administering to a mammal determined to be susceptible to a skin disease associated with one or more strains of P. acnes bacteria, the bacteriophage mixture, and/or the composition comprising a bacteriophage or a bacteriophage mixture described herein. In another example, the method comprises applying on an implant determined to be susceptible to P. acnes colonization, the bacteriophage mixture, and/or the composition comprising a bacteriophage or a bacteriophage mixture described herein. In some embodiments, an implant is determined to be susceptible to P. acnes colonization based on the reported occurrence in the scientific literature of colonization on such an implant.

[0144] In some embodiments, the bacteriophage is administered more than once to achieve a desired therapeutic effect. For example, when a host bacterium is destroyed, the bacteriophage that infected said bacterium can no longer multiply because its host has been eradicated and may be eliminated from the skin, eyes, teeth, or implant, and the bacteriophage may need to be re-administered, e.g., at least twice daily, at least daily, at least weekly, or at least monthly.

[0145] In some embodiments, the phage described herein may be administered in combination with one or more known and suitable medicaments for acne, including one or more topical or oral agents selected from a list comprising an antibiotic, an anti-comedonal, an anti-P. acnes agent, an anti-inflammatory, an anti-seborrhoeic agent, an anti P. acnes vaccine, a keratolytic agent, a sebum penetration enhancer, and a sunscreen. In that context, the one or more topical or oral agents and the phage may be administered simultaneously, or sequentially with the bacteriophage composition, i.e., in a single formulation or in separate formulations packaged either together or individually. In some embodiments, the keratolytic agent or the sebum penetration enhancer may be a cleansing agent that opens pores or enhances sebum penetration, which agent is administered prior to administering the phage.

### Methods of Selecting a Composition of the Application

[0146] Methods of selecting a mixture of phages that can treat a subject are provided herein. In some embodiments, the method of selecting a mixture of phages that can treat a subject by the methods set forth herein comprises (1) obtaining a biological sample from the subject, e.g., from the skin, eyes, teeth (2) culturing the bacteria obtained from the biological sample, (3) inoculating the cultured bacteria with a mixture of bacteriophage described herein, and (4) determining the amount (percentage) of P. acnes bacteria in the sample that are lysed by the mixture. In some embodiments, lysis of at least 50%, 60%, 70%, 80%, 85%, 90%, 95%, 97%, 98%, 99% or more of the P. acnes bacteria in the sample indicate that the mixture of phage can be used to treat the subject. In some embodiments, the lysis is determined by a liquid media assay and/or a solid media assay as described herein.

[0147] Methods of determining whether P. acnes is lysed by the phage mixture are provided herein. In some embodiments, the method comprises identifying P. acnes in a biological sample by culturing the sample in the presence of 20 μg/mL furazolidone, which selects for Propionobacterium, checking each bacterial colony by 16S ribosomal RNA gene (rRNA) sequencing to differentiate P. acnes from other Propionobacterium species and determining the percentage sensitivity of the P. acnes to the phage mixture, before and after phage treatment. In preferred embodiments, the percentage sensitivity of P. acnes in the sample to phage treatment is determined by using quantitative PCR (qPCR), with primers specific for P. acnes bacteria, before and after phage treatment. In some embodiments, the percentage sensitivity of P. acnes in the sample to phage treatment is determined by deep sequencing followed by metagenomic analysis, before and after phage treatment.

[0148] In some embodiments, the biological sample includes but is not limited to a skin sample, swab, a skin biopsy, a skin scraping, pus, wound, an abscess. In some embodiments, determining whether the cultured bacteria are lysed by the bacteriophage comprises performing direct test for phage sensitivity using the plaque assay or liquid OD method described herein. In some embodiments, a positive sample or subject to be treated is determined by the presence of plaque in a plaque assay. In some embodiments, a positive sample or subject to be treated is determined by a reduction in OD in a liquid OD assay. In some embodiments, the phage is labeled with a detectable marker, e.g., a luminescent or other marker that is activated upon infection, and the infection of the bacteria is determined by detecting an increase in the marker, e.g., in a luminescence assay.

### Examples

### Example 1. Sample Sourcing and Processing for Bacteriophage

### Materials and Methods

[0149] The candidate bacteriophages are isolated from sewage samples. Batches of sewage that comprise 5-6 raw sewage samples of 400 mL each, obtained from different places at different times are centrifuged and the supernatant is filtered sequentially through Merck (Merck KGaA, Darmstadt, Germany) Millipore glass fiber prefilter APFD, followed by prefilter APFB followed by Express plus PES 47 mm disks 0.45 μm filters using a vacuum filtration system. The pooled sewage sample mixes are concentrated using a Merck Millipore 100 kDa PelliconXL filter system (from 2 L to 20 mL) (Merck KGaA, Darmstadt, Germany). Concentrated sewage samples are then filtered through a 0.45 μm filter and stored at 4° C. Thus, each final sewage phage sample comprises of bacteriophages from 5-6 samples of different geographical origins.

### Example 2. P. acnes Bacterial Hosts Used in the Isolation, Production and Host-Range Experiments

### Materials and Methods

[0150] The following strains of P. acnes are either ordered or isolated in-house. Strains originating from the culture collections are revived per their instructions and aliquoted and preserved at −80° C. PA4 and PAP are laboratory isolates, purified by three serial rounds of colony isolation and confirmed to be P. acnes by 16S Sanger sequencing. In addition, all strains including both commercial and isolated ones are sequenced and their identity as P. acnes checked by aligning whole genome sequencing reads to the reference genome of P. acnes KPA171202 or a published genome if available. Table 2 below shows the sources of the P. acnes strains.

TABLE 2
Sources of P. acnes strains

| | Isolated | | Bacterial bank |
|---|---|---|---|
| Strain | from | Identifier | references and sources |
| PA1 | Human | 417/52 | ATCC 11828; BCRC 16146; |
| | subcutaneous | [VPI 0391] | CCUG 6369; KCTC 3320; |
| | abscess | | VPI 0391; JCM 6473 |
| PA2 | Human wound | Derm-CH102 | ATCC 33179; BCRC 16149 |
| PA3 | Human forehead | 3 | ATCC 29399; BCRC 16148 |
| PA4 | Culture | BiomX internal | DSM 32714, deposited on |
| | contamination | strain PA4 | Dec. 5, 2017 |
| PA5 | Culture | VPI 9 | ATCC 51277 |
| | contamination | | |
| PA6 | Clinical case of | NCTC 5235 | ATCC 6923; BCRC 16145; |
| | acne vulgaris | | NCTC 5235 |
| PA7 | Unknown | NCTC 556 | ATCC 6922; BCRC 16144; |
| | | [VPI 4978] | NCTC 556 |
| PA8 | Clinical case of | NCTC 4311 | ATCC 6921; BCRC 16150; |
| | acne vulgaris | [NCTC 2083a] | NCTC 4311 |
| PA9 | Unknown | 643-C, | ATCC 12930; NTC 10390 |
| | | [NCTC 10390] | |
| PA10 | Facial acne | NCTC 737 | ATCC 6919; BCRC 10723; |
| | | [VPI 0389] | CCUG 1794; CECT 5684; |
| | | | CGMCC 1.5003; CIP 53.117; |
| | | | DSM 1897; KCTC 3314; |
| | | | KCTC 5008; LMG 16711; |
| | | | LMG 3591; NBRC 107605; |
| | | | NCTC 737; NRRL B-4224; |
| | | | VKM Ac-1450; VPI 0389; |
| | | | JCM 6425 |
| PA11 | Unknown | Gerath [23, C-7, | ATCC 11827; KCTC 5012 |
| | | VPI 4979] | |
| PA13 | Culture | KPA171202 | DSM 16379 |
| | contamination | | |
| PAP | Culture | | DSM 32709, deposited on |
| | contamination | | Dec. 5, 2017 |

### Example 3. Screening Environmental and Clinical Samples for Phage that Recognize P. acnes

### Materials and Methods

[0151] Screening of the concentrated sewage samples for P. acnes phage is performed using a modified spot/drop plaque assay (Mazzocco A., et al. (2009) as described. Briefly, after overnight growth in Brain Heart Infusion broth (Becton, Dickinson and Company, Franklin Lakes, N.J.) supplemented with 5 g/L Yeast Extract (Acros Organics, Geel, Belgium) (“BHIS”), the strains are diluted 1:3 in BHIS. About 5.5 hours after the dilution, the strains are centrifuged (2000×g, 5 min, room temp) and re-suspended in 200 μL BHIS. In parallel, 48-well plates containing 0.5 mL per well of 1.5% agar BHIS (“bottom agar”) are prepared and incubated in a Don Whitley A35 anaerobic chamber (Don Whitley Scientific, Shipley, UK) for at least 2 hours to remove traces of oxygen from the medium. Aliquots of 0.4% agar BHIS (“top agar”) are melted and inserted into a heat-block at 55 degrees inside the anaerobic workstation. A volume of 100 μL of each of the concentrated P. acnes cultures is mixed with 4 mL top agar and 75 μL of this mixture is dispensed onto the bottom agar in the appropriate wells. The plates are left at room temperature for 20 minutes to solidify, then incubated for 40 minutes at 37° C. to recover.

[0152] After recovery, 10 μL of each of the sewage samples is pipetted onto the appropriate wells, left to absorb for 20 minutes, then incubated inverted overnight at 37° C. When plaques are observed, these are isolated by picking individual, well isolated plaques (using a sterile pipetting tip) into phage buffer (Tris-HCL pH 7.5 50 mM, NaCl 100 mM, MgCl₂.6H₂O 5 mM, MnCl₂.4H₂O 0.1 mM in DDW) and the process is repeated an additional 2 times for a total of 3 rounds of isolation.

[0153] Phage stocks of the phages isolated by the methods described above are created on the bacterial host PA1 by mixing 4 mL of BHIS with 400 μL from an overnight 3 mL cultures of PAL The culture is incubated anaerobically at 37° C. for 5 hours after which 50 μL of each phage isolate is added and this culture is further incubated overnight. The following morning, the cultures are centrifuged (4500×g, 10 min, 4° C.) and filtered through a 0.45 μm filter and stored at 4° C. Plaque assays are carried out as described above to estimate the titer of each phage stock.

### Results

[0154] A total of 21 phages are isolated by the methods described above. Phages PA1-4, PA1-9, PA1-11, PA1-12, PA1-13, PA1-14 are isolated on PA1. Phages NS19-1, NS13, NS7-1, PA2-4, PA2-7, PA2-13 are isolated on PA2. Phages PS7-1, PAP-1, PAP-4, PAP-7, PAP-8, PAP-11, PAP-12, PAP-13, PAP-14 are isolated on PAP.

### Example 4. Host Range Analysis of Isolated Phage

### Materials and Methods

[0155] Host range analysis for phage isolated on the PA1, PA2, and PAP strains, is performed on twelve P. acnes strains: PA1, PA2, PA3, PA4, PAP, PA5, PA6, PA7, PA8, PA9, PA10, and PA11. Each phage is added (10 μL) to bacterial lawns of P. acnes strains, in 48 well plates by drop assay. Plates are incubated for 24 hrs (37° C.) in anaerobic conditions, after which plaques become visible on the bacterial lawns. Plates with bacterial lawns of PA1, PA2, and PAP, and their respective phage serve as positive control. Host range analysis is done for each of the phage using 10 μL containing 10⁴ phage per well.

### Results

[0156] As shown in FIG. 1, where +++ indicates that the plaques are too numerous to count or total clearing, ++ indicates a countable number of plaques greater than 10, + indicates 1 to 10 plaques and − indicates no visible plaques, most P. acnes bacteria are very sensitive to a large number of the newly isolated phage.

### Example 5. Validation of Wide Phage Host Range Against Clinical P. acnes Strains that Demonstrate Antibiotic Resistance

[0157] Isolation of Clinical P. acnes Strains

[0158] A range of P. acnes strains (PAC1-PAC6 and PAC12-PAC14) are isolated from skin samples of healthy volunteers by using Hygiena Deep cleansing nose strips (Beautycare E. G., Bnei Darom, Israel) applied to the nose. A range of P. acnes strains (2001-1, 2001-3, 2001-5, 2002-3, 2002-7, 2002-9, 2003-2, 2003-8, 2003-10, 2004-8_2, 2004-8_3, 2004-8_4, 2004-8_5, 2004-8_6, and 2004-8_10) are isolated from skin samples of acne patients by using Hygiena Deep cleansing nose strips applied to the nose. The nose strips are applied according to the manufacturer's supplied User Guide on volunteer's noses (10 minutes, on wetted nose). Next, the strip is carefully removed from the nose and inserted into a polypropylene tube with 3 ml anaerobized BHIS broth. The tube is sealed and pulse vortexed for 15 seconds, and then inserted into the anaerobic work station. Using sterile tweezers, the nose strip is removed from the tube and discarded. A volume of 50 μL of the BHIS tube sample is then smeared using a sterile Drigalski spatula on a BHIS agar petri dish and incubated overnight at 37° C. in the anaerobic work station incubator. The following morning, using a sterile loop (for each colony), several separate colonies are picked and re-plated onto a new BHIS agar plate. The plate is incubated at 37° C. in the anaerobic work station incubator. The taxonomy of each isolate is confirmed to be P. acnes by 16S sequencing. Frozen stocks are prepared for each strain by freezing a stationary culture in 20% glycerol and stored at −80° C. Host range experiments on these strains are performed by plaque assay as described above, using 10 μL containing 10⁴ phage per well. Table 3 below shows the list of clinical isolates of P. acnes.

TABLE 3
List of clinical isolates of P. acnes

| Name | Isolated from |
|---|---|
| PAC1 | Healthy volunteer |
| PAC2 | Healthy volunteer |
| PAC3 | Healthy volunteer |
| PAC5 | Healthy volunteer |
| PAC6 | Healthy volunteer |
| PAC12 | Healthy volunteer |
| PAC13 | Healthy volunteer |
| PAC14 | Healthy volunteer |
| 2001-1 | Acne patient |
| 2001-3 | Acne patient |
| 2001-5 | Acne patient |
| 2002-3 | Acne patient |
| 2002-7 | Acne patient |
| 2002-9 | Acne patient |
| 2003-2 | Acne patient |
| 2003-8 | Acne patient |
| 2003-10 | Acne patient |
| 2004-8_2 | Acne patient |
| 2004-8_3 | Acne patient |
| 2004-8_4 | Acne patient |
| 2004-8_5 | Acne patient |
| 2004-8_6 | Acne patient |
| 2004-8_10 | Acne patient |

Host-Range of Phage on a Subset of the Clinical Isolates of P. acnes

[0159] Host range analysis for the phage isolated on the PA1, PA2, and PAP strains, is performed on a subset of the clinical P. acnes strains. See FIG. 2. Each phage is added (10 μL) to bacterial lawns of P. acnes strains, in 48 well plates by drop assay. Plates are incubated overnight (37° C.) in anaerobic conditions, after which plaques become visible on the bacterial lawns. Host range analysis is done for each of the phage using 10 μL containing 10⁴ phage per well. As can be seen in FIG. 2, where +++ indicates that the plaques are too numerous to count or total clearing, ++ indicates a countable number of plaques greater than 10, + indicates 1 to 10 plaques, − indicates no visible plaques, NT indicates Not Tested, most clinical P. acnes bacteria are very sensitive to a large number of the different phage strains.

### Assaying of Phage or Antibiotic Sensitivity

[0160] The phage sensitivity of the bacterial strains is tested either by regular plaque assay as described previously, or by dropping 5 μL of a stock of the phage on a lawn of the tested bacteria and letting the plate incubate for 24 hours at 37° C. anaerobically. The antibiotic susceptibility of the strains is measured by placing 5-10 μL of the antibiotics on a freshly prepared lawn of the bacterial strain, and incubating overnight at 37° C. anaerobically. The concentrations of clinically relevant antibiotics used are 15 μg/mL Trimethoprim (Merck KGaA, Darmstadt, Germany), 20 μg/mL Erythromycin (Acros Organics, Geel, Belgium), 1% Clindamycin (Selleck Chemicals, Houston, Tex.) and 10 μg/mL Tetracycline (Merck KGaA, Darmstadt, Germany). See FIG. 6, where ++ indicates that the plaques are totally cleared, + indicates partially cleared, − indicates not cleared, and NT indicates Not Tested. Results of host range studies on the clinical P. acnes strains suggest that wide coverage of infectivity of multiple P. acnes strains can be attained by application of individual phage or phage mixtures comprising different phage with overlapping host infectivity patterns.

### Example 5. Non-Infectivity of P. granulosum Strain PAC4

### Materials and Methods

[0161] In order to examine the specificity of the isolated phage against other bacterial strains, they are tested for their ability to infect a close relative of P. acnes which is also found in the skin microbiome, P. granulosum.

[0162] As part of the clinical P. acnes strain isolation study as described in Example 4, some strains of P. granulosum were isolated from skin samples of healthy volunteers by using nose pore strips Hygiena Deep cleansing nose strips (Beautycare E. G., Bnei Darom, Israel) applied to the nose. Strain assignment is done by 16S sequencing followed by validation using whole genome sequencing. Using the previously mentioned plaque assay, the infectivity of P. granulosum strain PAC4 is tested for the whole panel of P. acnes phage at a concentration of 10⁶ PFU/mL.

### Results

[0163] As can be seen in FIG. 3, no plaque or clearing zone is observed in any of the plates/wells which further supports the notion that P. acnes phage are species specific.

[0164] To further confirm these results, 3 more clinical isolates of P. granulosum (2004-8, 2004-4 and 2002-1) are tested with four P. acnes phage (PS7-1, PA1-9, PA1-13, PAP-12) by spot/drop plaque assay at a concentration of 10⁶ PFU/mL using 5 μL drops. These bacterial strains show sensitivity to Clindamycin (1% gel, ˜10 μL) and Erythromycin (20 μg/mL, 5 μL) when the antibiotics are applied directly to a bacterial lawn of these strains, but are resistant to all the tested phage.

### Example 6. Phage Activity Against a P. acnes Mutant Strain that has Developed Phage Resistance

### Developing a Phage Resistant Mutant

[0165] To develop phage resistant mutants, PA3 is cultured overnight anaerobically at 37° C. in a 4 mL BHIS culture tube, diluted the morning after 1:10 and grown a few hours to OD 0.4-0.8. The culture is then further diluted to OD 0.2. The diluted culture is dispensed at 0.2 mL per well into a 96-well plate, after which 10 μL of phage PAP-1 at 10⁶ PFU/mL is added and finally this is covered with 40-50 μL of mineral oil. After sealing the plate with a sterile SealPlate film (Merck KGaA, Darmstadt, Germany) the plate is incubated in a Tecan M200 Pro plate reader (Tecan Group, Männedorf, Switzerland) at 37° C. to follow the infection dynamics. Following lysis by the phage, the OD decreases. Later, the OD starts increasing because of growth of resistant mutants. A fresh BHIS agar plate is then inoculated with 100 μL of the culture in the wells showing re-growth, and incubated for 48 hours anaerobically at 37° C. This mutant PA3 strain that has become resistant to the PAP-1 phage is named B9.

### Corroborating PAP-1 Resistance of B9

[0166] Colonies of B9 are used to inoculate 4 mL of BHIS and incubated for 48 hours due to slower growth than the PA3 strain. These are then diluted to OD 0.2 and tested using the same method as described above. Growth of the mutants is identical with or without the addition of high titer phage PAP-1, while the wildtype (WT) control shows lysis by the phage and lowering of OD compared to the WT control without phage, supporting the fact that these are indeed P. acnes mutants resistant to PAP-1 even though derived from a parent strain that is sensitive to this phage.

### Sequencing of Resistant Mutants

[0167] The same culture that is used to re-test the mutants is further divided into two, with approximately 2 mL being mixed 1:1 with 50% glycerol and frozen at −80° C. to create a stock. The remaining culture is spun down and genomic DNA is extracted using the QIAGEN QIAamp DNA mini kit (Qiagen N.V., Hilden, Germany), by following the manufacturer's protocol for DNA isolation from gram positive bacteria. This DNA is sequenced using an Illumina MiS eq machine (Illumina, San Diego, Calif.). Analysis of the sequencing results shows that the mutant is indeed P. acnes strain PAP3 with various modifications along the genome.

### Testing the Sensitivity/Resistance of Mutant B9 to Other Phage

[0168] To test the resistance of B9 against the various P. acnes phage, a 4 mL tube of BHIS is inoculated with B9 colonies and incubated over 3 days at 37° C. These are then spun down by centrifugation (5 min, 2000×g, RT) and re-suspended in 0.2 mL BHIS. This culture is then used as the basis for a plaque assay using the method described previously.

[0169] As can be seen in FIG. 4, where R indicates resistance to infection with the tested phage, and S indicates sensitivity to infection with the tested phage, the B9 mutant which is isolated based on resistance to PAP-1 has simultaneously developed resistance to additional phage to which the original PA3 is sensitive. There are four phage which display the ability to infect the mutant bacterial strain (NS19-1, PS7-1, NS13 and PA1-4) and an additional phage (PA1-13) with very limited infectivity.

Phage that Infect the B9 Mutant but not its Parent PA3

[0170] When testing the parent strain of the mutant B9, named PA3, using the plaque assay described above, several phage tested show borderline (1-10 plaques, phages NS19-1, PS7-1, PA2-13, PAP-7, PAP-11) or no infectivity (no visible plaques, phages NS13, PA1-4, PA2-4, PAP-8) at a titer of 10⁶ PFU/mL. Interestingly, some of the phages with borderline infectivity of strain PA3, namely phages NS19-1 and PS7-1, showed infectivity of the more phage resistant mutant B9. Phages NS19-1 and PS7-1 have more than 89.5% genomic similarity while phages NS13 and PA1-4 which are able to infect B9 but not the parent strain PA3 are also closely related at more than 91.5% genomic similarity. See FIG. 10.

### Example 7. Non-Interference Between Phage in Host Infection

### Materials and Methods

[0171] Host strain PA4, which is efficiently infected only by phages PA1-4 and PAP-12, is used to test whether there is any negative effect on mixing different P. acnes phage together. Strain PA4 is grown overnight in 4 mL BHIS. The following morning, it is diluted 10× in BHIS and allowed to grow until an OD of ˜0.8. This culture is used as the basis for doing a 48-well plaque assay as described previously. After the 48-well plates containing both bottom and top agar with bacteria are prepared, all of the phages, including PAP-12, are diluted to 10⁶ PFU/mL. These diluted phages are then mixed either in a 1:1 ratio with fresh BHIS medium or 1:1 with the 10⁶ PFU/mL stock of PAP-12. 10 μL of the phage+BHIS combination or phage+PAP-12 combination is used in the plaque assay. After the required overnight incubation, plaques are counted.

### Results

[0172] As can be seen in FIG. 5, the presence of additional phage did not interfere with the PAP-12 effect on PA4 suggesting that several phages can be combined in a mixture without impairing the specific function of any individual phage.

### Example 8. Efficacy of Phage In Vivo in a Mouse Ear P. acnes Induced Swelling Model

### Intradermal Study

### Materials and Methods

[0173] The intradermal study consisted of three groups ICR female mice (n=20) (ENVIGO CRS, Ness Ziona, Israel). All groups are subjected to model induction by a single intradermal (ID) injection of 20 μL P. acnes suspension at a concentration of 1×10¹⁰ CFU/mL into the dorsum of the right ear. In Group 2, 20 μL of PAP-7 phage suspension is injected intradermally into the same ear, 3 hours post P. acnes injection. In Group 3, 20 μL of phage suspension is injected intradermally to the same ear 3 hours prior to P. acnes injection. In all groups, the left ear serves as a control and is injected with PBS once in Group 1 or twice in Groups 2 and 3, under identical experimental conditions. Group 1 serves as a control group for model induction.

[0174] Ear thickness is measured by micro-caliper (Mitutoya, 0.01 mm (Mitutoyo Europe GmbH, Neuss, Germany) shortly before model induction, 24 hours, 48 hours and 72 hours post model induction. The increase in ear thickness of the right ear (i.e. P. acnes injected ear) is calculated as a percentage of the left ear (i.e. PBS injected ear).

### Results

[0175] FIG. 7 shows the reduction of ear swelling after treatment with phage in the P. acnes intradermal infection model, 24 hours, 48 hours and 72 hours post model induction. Intradermal phage administration prevents ear swelling in the mouse model when ear thickening is induced by intradermal injection of P. acnes. This effect is demonstrated by ear thickening mostly after 24 hrs from P. acnes induction.

### Topical Study

### Materials and Methods

[0176] The topical study consists of four groups of n=6 ICR female mice (ENVIGO CRS, Ness Ziona, Israel). All groups are subjected to model induction by gentle scratching with a 0.2 ml tip (10 times/ear) to generate a single superficial laceration. The laceration causes the skin to become visibly damaged, characterized by reddening with no indication of bleeding. Immediately following the laceration, 10 μL of a single topical application of a 1×10¹⁰ CFU/mL phage combination of PS7-1, PAP-1, and PAP-12 (Groups 2,3 and 4) or PBS (Group 1) is applied. Both ears are treated. Treatment is at 30 min and 3 hours after infection with P. acnes. Group 1 and 2 receive PBS, Group 3 receives 1×10⁸ CFU/mL phage suspension, and Group 4 receives 1×10¹¹ CFU/mL phage suspension. Both ears of all animals are measured using a micro-caliper (Mitutoya, 0.01 mm) (Mitutoyo Europe GmbH, Neuss, Germany) before model induction and at 24 hours following model induction.

### Results

[0177] Using this model, the efficacy of topical administration of P. acnes phage when administered after P. acnes in the bacterial induced ear swelling model is demonstrated. As can be seen in FIG. 8, at the 24-hour time point, there is no swelling in the P. acnes+ phage treated ears (Groups 3 and 4) as compared to the P. acnes only treated ears (Group 2). It can also be seen that administration of phage at the lower titer (Group 3) approximating the anticipated therapeutic dose brings about the entire effect and a higher titer is not required.

### Example 9. Efficacy of Isolated Phage on Biofilm

### Materials and Methods

[0178] To test our phage against P. acnes biofilms, the following experiment is performed on biofilms produced in the laboratory. An overnight culture of PA1 is diluted 1:1 with fresh BHIS and incubated for 4 hours at 37° C. after which the culture is once again diluted 1:1 this time with anaerobized BHIS supplemented with 1% glucose (final conc. 0.5%). Next, a 96-well plate (Thermo Fisher Scientific, Waltham, Mass.) is seeded with 200 μL of the diluted culture per well. The wells are sealed using 8-well strip caps (Thermo Fisher Scientific, Waltham, Mass.). This is incubated for 3 days to let the biofilm form. After 72 hours, 10 μL of either mixture 1 (PAP-12, PA1-9 and PA1-13), mixture 2 (PA7-1, PA1-9 and PA1-13), mixture 3 (PAP-12, PA1-9, PA1-13 and PS7-1) or 2 μL of Erythromycin is added to the relevant wells. The amount of phage added per mixture corresponds to 10⁵ total PFU while for the antibiotic Erythromycin, a final concentration of 100 μg/mL (enough to inhibit PA1 growth when not in a biofilm) is used.

[0179] At 24 hrs or 48 hrs post-treatment depending on the wells, the medium is carefully removed from each well and the remaining biofilm is picked from each well into a separate Eppendorf tube using a sterile tip. At this point, 1 mL of fresh BHIS is added to the biofilm tubes, sonicated to remove the phage inside for 5 minutes (Elmasonic S 100, at 37 kHz) (Elma Schmidbauer GmbH (Singers, Germany), and centrifuged (4 min, 4000 rpm, 25° C.). The supernatant containing the phage is carefully removed to a clean tube for quantification and the process was repeated a total of 3 times to make sure all phage are removed.

[0180] To quantify the surviving bacteria, the pellet is re-suspended in 100 μL BHIS, 10-fold serially diluted in BHIS and plated on BHIS agar plates. The plates are incubated for 72 hrs at 37° C. anaerobically after which the colonies are counted and results rounded to the nearest log. In parallel, the phage quantities inside the biofilm are tested by taking the supernatant set aside earlier, and using the aforementioned plaque assay to assess the original quantities.

### Results

TABLE 4
Remaining log bacteria after phage or antibiotic treatment of biofilm

| | Logs CFU | |
|---|---|---|
| | 24 hours post treatment | 48 hours post treatment |
| No treatment (n = 6) | More than 9 | More than 9 |
| Phage mixture 1 (n = 3) | 4 | 4 |
| Phage mixture 2 (n = 3) | 4 | 4 |
| Phage mixture 3 (n = 3) | 4 | 6 |
| Erythromycin (n = 3) | More than 9 | 8 |

[0182] As can be seen in Table 4, a large decrease of at least 4 logs in bacterial counts after 24 hours with phage is seen compared to no visible decrease in the antibiotic arm. After 48 hours the two 3-phage mixtures still show 4 logs less CFU than the no treatment arm, while the 4-phage mixture shows 6 logs less CFU. This is in contrast to the antibiotic arm of the experiment that showed 8 logs of remaining bacteria per milliliter. These results demonstrate the efficacy of phage against target P. acnes bacteria even when these are growing in biofilm form. By comparison, the antibiotic erythromycin, to which this bacterial strain is sensitive, is significantly less effective in lysing P. acnes bacteria growing as biofilm. The amount of phage remaining inside the biofilm is 5.3×10⁵, 7.0×10⁵ and 4.3×10⁵ per well for phage mixtures 1, 2 and 3 respectively.

### Example 10. Applying Phage Combinations Increases the Time Until Mutants Appear

### Materials and Methods

[0183] The application of a combination of P. acnes infecting phage is tested for its ability to delay the time until appearance of a resistant mutant P. acnes strain. When infecting with single phage, bacteria with mutations in the phage receptor tend to be selected for. By combining phage with different receptors or different receptor affinities, the time to mutant (TTM, the time it takes for a bacterial mutant to take over the culture) can be increased. The two phages to be combined, PAP1 and PA1-4, are selected because they differ both genetically and functionally based on host-range. PAP1 belongs to the functional cluster 3b while PA1-4 belongs to the functional cluster 5. Phages are tested separately and in a mixture on PA3 bacteria using OD₆₀₀ measurements every 15 minutes as described previously. The individual phages and the phage mixture are tested at a final concentration of 10⁶ PFU/mL.

[0184] All work is performed at anaerobic conditions in an A35 Don Whitley anaerobic workstation. PA3 is cultured overnight anaerobically at 37° C. in a 4 mL BHIS culture tube, diluted the morning after 1:3 and incubated for 4 hours until reaching OD 0.8-1.2. In the meanwhile, phages PAP-1 and PA1-4 are diluted to 10⁸ PFU/mL, and a 1:1 mixture of these phage at this concentration is also prepared. The culture is then further diluted to OD 0.2. This is dispensed at 190 μL per well into a 96-well plate, after which 10 μL of the phage containing samples ire added in triplicates. Finally, this is covered with 40 μL of mineral oil. After sealing the plate with a sterile SealPlate film (Merck KGaA, Darmstadt, Germany), the plate is incubated in a Tecan M200 Pro plate reader at 37° C. to follow the infection dynamics with measurements every 15 minutes. Following lysis by the phage, the OD decreases. Later, the OD increases because of the growth of resistant mutants.

### Results

[0185] All cultures containing phage show an initial expected decrease in OD due to phage predation. To compare the time it takes for the resistant mutant bacteria to appear, the OD₆₀₀ threshold of 0.2 is used to measure the TTM. As can be seen in FIG. 9, the PAP-1 and PA1-4 only cultures show TTMs of 42 and 40 hours while the 1:1 mixture mix of the two phages shows a TTM of 50 hours. These results demonstrating a shift in the time to the appearance of resistant mutants when both phage are applied simultaneously support the previous observations that these two phage belong to different functional clusters.

### Example 11. Genetic Analyses of Phage Shows High Levels of Similarity Between Phage with Some Small Diversity

### Sequencing of Phage Stocks

[0186] Phage DNA is extracted from 200 μL of stock containing at least 10⁹ PFU. Bacterial DNA present in each of the lysates is removed by treating with the Ambion Turbo free DNA kit (Thermo Fisher Scientific, Waltham, Mass.) after which the QIAGEN QIAamp DNA mini kit (Qiagen N.V., Hilden, Germany) is used to extract the gDNA of the phage per manufacturer instructions. Elution of DNA is done by two rounds of elution with 30 μL AE buffer incubated for 3-5 minutes on the spin column and DNA is quantified using a Nanodrop 2000. After extraction, Illumina sequencing libraries are created following the protocol of Baym et al. (Baym et al., 2015), and sequenced using a MiSeq machine.

### Phage DNA Assembly and Analysis

[0187] Reads are assembled using SPAdes v3.10.1 (Nurk et al., 2013). The phage genomes are compared by using BLASTN (Altschul et al., 1997), by combining all non-overlapping alignment segments (BLAST HSPs), summing their numbers of identical matches and dividing this sum with the length of the longer sequence to get to the percent identity. Clustering of the percent identity table is done by the Hclust algorithm in R-studio version 1.0.143 (R Core Team (2017). R: A language and environment for statistical computing. R Foundation for Statistical Computing, Vienna, Austria). The results are shown in Table 5 below and FIG. 10. As shown in FIG. 10, there are two small groups with very high genomic similarity, namely group 1 (PA1-13, PA2-13 and PA1-4) and group 2 (PAP-1 and PAP-12).

TABLE 5
Characterization of isolated phage

| Name | Isolated on | Length (kbp) | GC % |
|---|---|---|---|
| NS19-1 | PA2 | 30.1 | 53.9 |
| NS13 | PA2 | 29.7 | 54.5 |
| NS7-1 | PA2 | 29.7 | 54.1 |
| PS7-1 | PA2 | 29.9 | 54.2 |
| PA1-4 | PA1 | 29.1 | 54.5 |
| PA1-9 | PA1 | 29.3 | 54.0 |
| PA1-11 | PA1 | 29.5 | 54.1 |
| PA1-12 | PA1 | 29.2 | 54.1 |
| PA1-13 | PA1 | 29.9 | 54.4 |
| PA1-14 | PA1 | 29.8 | 54.2 |
| PA2-4 | PA2 | 29.6 | 54.3 |
| PA2-7 | PA2 | 29.7 | 54.5 |
| PA2-13 | PA2 | 29.7 | 54.4 |
| PAP-1 | PAP | 29.6 | 54.0 |
| PAP-4 | PAP | 29.8 | 54.1 |
| PAP-7 | PAP | 29.9 | 54.3 |
| PAP-8 | PAP | 29.4 | 54.6 |
| PAP-11 | PAP | 29.9 | 54.3 |
| PAP-12 | PAP | 29.6 | 54.0 |
| PAP-13 | PAP | 30.0 | 54.4 |
| PAP-14 | PAP | 30.3 | 54.5 |

### Example 12. Efficacy of Therapeutic Cocktail on Clinical P. acnes Strains

### Bacterial Isolation

[0188] P. acnes was isolated from healthy volunteers and individuals with acne according to protocol MBC-CL-01-2016 (clinicaltrials.gov identifier NCT03009903). Helsinki IRB approvals were obtained for both protocols and informed consent signed by all volunteers. Collection and isolation of P. acnes from skin was obtained either from the nose, using cosmetic nose strips (Beautycare E. G., Bnei Darom, Israel) applied per manufacturer's instructions or from the forehead, by rubbing sterile dry swabs (COPAN diagnostics) moistened in sampling buffer (0.1% Triton+0.075M phosphate buffer) for 30 seconds on a 4 cm² area.

[0189] The obtained nose strips were cut in two and one half placed in bacterial growth medium and the second half in phage buffer. The bacterial medium was checked for the presence of P. acnes bacteria by plating onto supportive agar plates containing furazolidone for Propionibacteria isolation and followed for colony growth. Colonies were picked, named and tested by molecular biology techniques for identity. Species assignment of the bacteria was done by 16S rDNA sequencing followed by validation using whole genome sequencing.

[0190] Alternatively, two skin samples were obtained from each individual's forehead: one swab was stored in an empty sterile tube at −80° C. for DNA extraction. The other swab used placed in sterile 15 mL test tube containing 4 mL of 0.1% Triton+0.075M phosphate buffer and stored at 4° C. and used for bacterial isolation. Each swab was vortexed for 30 seconds and 10 μl of each sample was streaked onto BHIS agar plate containing 20 μg/mL Furazolidone, to select for Propionibacteria. Isolated propionibacterium colonies were cultured in BHIS under anaerobic conditions and glycerol stocks were prepared. Equal volumes of overnight culture were mixed with 50% glycerol, divided into cryotubes and stored at −80° C.

### Determination of Antibiotic Resistance:

[0191] For the isolation of antibiotic resistant colonies, 50 μl out of the 4 ml derived from the skin swabs were spread evenly onto plates to which antibiotics were added as follows: 0.5 μg/mL Clindamycin; BHIS+20 μg/mL Furazolidone+0.5 μg/mL Erythromycin; BHIS+20 μg/mL Furazolidone+5 μg/mL Tetracycline; BHIS+20 μg/mL Furazolidone+5 μg/mL Minocycline. All antibiotics were purchased from Sigma-Aldrich (Rehovot, Israel).

[0192] Plates were allowed to dry in a biological hood for ˜30 minutes and then incubated in a lock & lock box with three GasPak Easy sachets (Becton Dickinson, Franklin Lakes, N.J.) under anaerobic conditions, at 37° C. for approximately one week. Plates were inspected daily for colony appearance. When bacterial growth was visible, a total of 10 individual colonies from each sample were picked (different morphologies and different antibiotics were chosen).

[0193] The antibiotic susceptibility of the clinical isolates derived from volunteers with and without acne was further evaluated by prepared lawns of the selected bacterial strains and adding 5-10 μL drops of the selected relevant antibiotics onto the fresh lawns and observing for clearance after overnight incubation at 37° C. under anaerobic conditions. Clinically relevant antibiotics were used at the following concentrations: (0.5 μg/ml Clindamycin (Selleck Chemicals, Houston, Tex.), 5 μg/ml Minocycline (Sigma-Aldrich (Rehovot, Israel), 0.5 μg/ml Erythromycin (Acros Organics, Geel, Belgium), 5 μg/ml Tetracycline (Merck KGaA, Darmstadt, Germany)). The results of the antibiotic resistance of the clinical strains are summarized in FIG. 12.

### Determination of Phage Sensitivity

[0194] In order to test sensitivity to the phage cocktail (PS7-1, PA1-13 and PAP-12), the chosen isolated bacterial colonies were grown overnight in 4 mL BHIS at 37° C. in the anaerobic workstation. The next morning, each bacterial strain culture was diluted in BHIS to a starting OD of ˜0.7 and incubated at 37° C. in the anaerobic workstation.

[0195] When an increase in bacterial OD was observed, samples were tested either by preparing a phage cocktail lawn at a concentration of 10⁶ and plating 5 μl bacterial strain on it, or by preparing a lawn of each strain onto BHIS plates, drying in the biological hood for ˜30 minutes and addition of 5 μl of phage cocktail at a final concentration of 10⁴ to each lawn. Plates were left to dry for additional 30 minutes in the biological hood and then incubated at 37° C. in the anaerobic workstation for ˜48 h. The results of the phage infection are summarized in FIG. 11.

### Determination of Ribotype

[0196] To determine the isolates' ribotype, 16s gene PCR analysis was performed using primers 27F and 1492R, analyzed by Sanger sequencing and aligned against RT1 ribotype with CloneManage software.

[0197] In order to obtain overlapping sequences around the ends of the reads and prevent mistakes due to sequencing errors, three primers were used (27F,529F,1492R) for sequencing. The primers' sequences are as follows in Table 6:

TABLE 6
Primer sequence identification numbers used to
identify ribotypes of the bacterial isolates.

| SEQ ID | | |
|---|---|---|
| NO. | Brief Description | Size (base pairs) |
| 22 | 27F- | 20 |
| | AGAGTTTGATCCTGGCTCAG | |
| 23 | 1492R- | 20 |
| | CGGTTACCTTGTTACGACTT | |
| 24 | 529F- | 20 |
| | AGCGTTGTCCGGATTTATTG | |

[0198] The relevant ribotype was determined according to the alignment to RT1 sequence (shown below) and the ribotype specific mutations as seen in Table 7:

TABLE 7
Ribotype mutations compared to RT1

| Ribotype | Mutations compared to RT1 |
|---|---|
| RT1 | — |
| (SEQ ID NO: 25) | |
| RT2 | T838C |
| RT3 | T992C |
| RT4 | G1043C, A1187C |
| RT5 | G1043C |
| RT6 | T838C, C1322T |
| RT7 | G529A |
| RT8 | G989A, T992C |
| RT9 | G1254A |
| RT10 | T539C, G1043C |

[0199] Approximately 130 clinical lines were tested, and most were identified as ribotypes RT1, RT2 or RT3. The four ribotypes generally thought to be most associated with acne in patients (RT4, RT5, RT8 and RT9) were also found and determined to be susceptible to the phage cocktail (see FIGS. 11 and 12).

### Results

[0200] A three-phage cocktail targets over 95% of clinical P. acnes strains (see FIG. 11). Approximately 130 P. acnes clinical lines were isolated from acne patients and healthy individuals as described above. Of these, a large number exhibited antibiotic resistance against one or more antibiotics when tested against a panel of 4 antibiotics (FIG. 12). Only 5 samples were found to be resistant to a three-phage cocktail that has been designed based on the principles described above. A few isolates that were found to be resistant to furazolidone and resistant to the phage cocktail, were later identified by sequencing as not being P. acnes isolates (data not shown). When a subset of the P. acnes clinical lines was subjected to ribotyping, it was further observed that the phage susceptible clinical lines included strains of the four ribotypes generally considered to be associated with acne. These are ribotypes RT4, RT5, RT8 and RT9. These results demonstrate susceptibility of clinical strains with the generally considered disease-associated ribotypes to a designed phage cocktail.

### REFERENCES

[0201] 1. Abedon, S. T., and Yin, J. (2009). Bacteriophage plaques: theory and analysis. Methods in molecular biology (Clifton, N.J.), 501, 161-74.
[0202] 2. Abedon, S. T., et al. (2011). Bacteriophage prehistory: is or is not Hankin, 1896, a phage reference? Bacteriophage 1, 174-178.
[0203] 3. Achermann Y et al. (2014). Propionibacterium acnes: from Commensal to Opportunistic Biofilm-Associated Implant Pathogen. Clinical Microbiology Reviews, 27(3):419-440.
[0204] 4. Altschul S. F. et al. (1997) Gapped BLAST and PSI-BLAST: a new generation of protein database search programs. Nucleic Acids Res. 25:3389-3402.
[0205] 5. Archer N. K., et al. (2011). Staphylococcus aureus biofilms: properties, regulation, and roles in human. Virulence 2:445-459.
[0206] 6. Aucoin P. J. et al. (1986). Intracranial pressure monitors. Epidemiologic study of risk factors and infections. American Journal of Medicine 80(3):369-376.
[0207] 7. Baym M. et al. (2015). Inexpensive multiplexed library preparation for megabase-sized genomes” PLoS ONE, 10(5), 1-15.
[0208] 8. Brandwein, M. et al. (2016). Microbial biofilms and the human skin microbiome. NPJ Biofilms and Microbiomes, 2,3.
[0209] 9. Chaudhury A, and Das S. (2011). Recent advancement of chitosan-based nanoparticles for oral controlled delivery of insulin and other therapeutic agents. AAPS PharmSciTech. 2011 March; 12(1):10-20.
[0210] 10. Clokie M. R., Kropinski A. M. (eds) Bacteriophages. Methods in Molecular Biology™, Vol 501.81-85 Humana Press.
[0211] 11. Clokie M. R. J. et al. (2018). Bacteriophages Methods and Protocols Volume 3, Humana Press
[0212] 12. Conen, A et al. (2008). Characteristics and treatment outcome of cerebrospinal fluid shunt-associated infections in adults: a retrospective analysis over an 11-year period. Clinical Infectious Diseases, vol. 47, no. 1, pp. 73-82.
[0213] 13. Costerton J. W. et al., (1999). Bacterial biofilms: a common cause of persistent infections. Science 284:1318-1322.
[0214] 14. Cove, J. H. et al. (1983). Effects of oxygen concentration on biomass production, maximum specific growth rate and extracellular enzyme production by three species of cutaneous propionibacteria grown in continuous culture. Journal of General Microbiology 129(11):3327-3334.
[0215] 15. Dunne W. M. (2002). Bacterial adhesion: seen any good biofilms lately? Clin. Microbiol. Rev. 15:155-166.
[0216] 16. Del Pozo J. L. et al. (2009). Pilot study of association of bacteria on breast implants with capsular contracture. Journal of Clinical Microbiology, vol. 47, no. 5, pp. 1333-1337.
[0217] 17. Del Pozo J. L. and Patel R (2009). Infection associated with prosthetic joints. The New

[0218] England Journal of Medicine, 361(8):787-794.
[0219] 18. Delahaye F. et al. (2005). Propionibacterium acnes infective endocarditis. Study of 11 cases and review of literature,” Archives des Maladies du Coeur et des Vaisseaux, vol. 98, no. 12, pp. 1212-1218.
[0220] 19. Delgado, S. et al. (2011). Identification, typing and characterisation of Propionibacterium strains from healthy mucosa of the human stomach. International Journal of Food Microbiology 149(1):65-72.
[0221] 20. Deramo V. A. et al. (2001). Treatment of Propionibacterium acnes endophthalmitis. Current Opinion in Ophthalmology, vol. 12, no. 3, pp. 225-229.
[0222] 21. Dodson, C. C. et al. (2010). Propionibacterium acnes infection after shoulder arthroplasty: a diagnostic challenge,” Journal of Shoulder and Elbow Surgery, 19(2):303-307.
[0223] 22. Dréno, B. et al. (2016). Bacteriological resistance in acne: a call to action. Eur. J. Dermatol. 26, 127-132.
[0224] 23. Fischer, N. et al. (2013). Deciphering the intracellular fate of Propionibacterium acnes in macrophages. BioMed Research International, 2013, [603046].
[0225] 24. Fitz-Gibbon, S et al. (2013). Propionibacterium acnes Strain Populations in the Human Skin Microbiome Associated with Acne, Journal of Investigative Dermatology, 133(9): 2152-2160.
[0226] 25. Golkar, Z. et al. (2014). Bacteriophage therapy: a potential solution for the antibiotic resistance crisis. J. Infect. Dev. Ctries 8, 129-136.
[0227] 26. Gribbon E. M. et al. (1994). The microaerophily and photosensitivity of Propionibacterium acnes. Journal of Applied Bacteriology 77(5):583-590.
[0228] 27. Guio L et al. (2009). Chronic prosthetic valve endocarditis due to Propionibacterium acnes: an unexpected cause of prosthetic valve dysfunction. Rev Esp Cardiol. 62(2):167-77.
[0229] 28. Haidar R et al. (2010). Propionibacterium acnes causing delayed postoperative spine infection: review,” Scandinavian Journal of Infectious Diseases, vol. 42, no. 6-7, pp. 405-411
[0230] 29. Hannigan G. D. and Grice E. A. (2013). Microbial Ecology of the Skin in the Era of Metagenomics and Molecular Microbiology. Cold Spring Harb Perspect Med, 3: a015362.
[0231] 30. Hoefnagel D. et al. (2008). Risk factors for infections related to external ventricular drainage. Acta Neurochirurgica, 150(3)209-214.
[0232] 31. Holmberg, A. et al. (2009). Biofilm formation by Propionibacterium acnes is a characteristic of invasive isolates. Clinical Microbiology and Infection, 15: 787-795.
[0233] 32. Human Microbiome Project Consortium, (2012). Structure, function and diversity of the healthy human microbiome. Nature, 486:207-214.
[0234] 33. Hunyadkürti, J. et al. (2011). Complete genome sequence of Propionibacterium acnes type IB strain 6609. Journal of Bacteriology 193(17):4561-4562.
[0235] 34. Hyman, P., and Abedon, S. T. (2010). Bacteriophage host range and bacterial resistance. Advances in applied microbiology (1st ed., Vol. 70, pp. 217-48). Elsevier Inc.
[0236] 35. Jońiczyk-Matysiak, E. et al. (2017). Prospects of Phage Application in the Treatment of Acne Caused by Propionibacterium acnes. Frontiers in Microbiology, 8:1-11.
[0237] 36. Kurtz S. M. et al. (2012). Economic burden of periprosthetic joint infection in the United States. J Arthroplasty. 27(8 Suppl):61-5.el.
[0238] 37. Kutter, E. (2009). Phage host range and efficiency of plating. Methods in molecular biology (Clifton, N.J.), 501, 141-9.
[0239] 38. Levy R. M., et al. (2003). Effect of antibiotics on the oropharyngeal flora in patients with acne. Arch. Dermatol. 139, 467-471.
[0240] 39. Lyke, K. E. et al. (2001). Ventriculitis complicating use of intraventricular catheters in adult neurosurgical patients. Clinical Infectious Diseases, 33(12):2028-2033.
[0241] 40. Malik D. J., et al. (2017). Formulation, stabilisation and encapsulation of bacteriophage for phage therapy. Adv Colloid Interface Sci.49:100-133.
[0242] 41. Marinelli L. J. et al. (2012). Propionibacterium acnes bacteriophages display limited genetic diversity and broad killing activity against bacterial skin isolates. mBio 3(5):e00279-12
[0243] 42. Mayhall, C. G. et al. (1984). Ventriculostomy-related infections. A positive epidemiologic study. The New England Journal of Medicine 310(9):553-559.
[0244] 43. Mazzocco A., et al. (2009). Enumeration of Bacteriophages Using the Small Drop Plaque

[0245] Assay System.
[0246] 44. McDowell A. et al. (2008). A new phylogenetic group of Propionibacterium acnes. J. Med. Microbiol. 57:218-224.
[0247] 45. Michalek S. et al. (2015). The use of trimethoprim and sulfamethoxazole (TMP-SMX) in dermatology. Folia Med. Cracov. 55, 35-41.
[0248] 46. Nishijima K. et al. (1996). Sensitivity of Propionibacterium acnes isolated from acne patients: comparative study of antimicrobial agents. J. Int. Med. Res. 24, 473-477.
[0249] 47. Nurk et al., (2013). Assembling Single-Cell Genomes and Mini-Metagenomes From Chimeric MDA Products. Journal of Computational Biology. 20(10):714-737.
[0250] 48. Perry A. and Lambert P. (2011). Propionibacterium acnes: infection beyond the skin.
[0251] 49. Piper K. E. (2009) Microbiologic diagnosis of prosthetic shoulder infection by use of implant sonication. Journal of Clinical Microbiology, vol. 47, no. 6, pp. 1878-1884.
[0252] 50. Portillo, M. E. et al. (2013). Propionibacterium acnes: An Underestimated Pathogen in Implant-Associated Infections,” BioMed Research International, vol. 2013, Article ID 804391, 10 pages.
[0253] 51. Rieger, U. M. et al. (2009). Sonication of removed breast implants for improved detection of subclinical infection. Aesthetic Plastic Surgery, vol. 33, no. 3, pp. 404-408.
[0254] 52. Sampedro M. F. et al. (2010). A biofilm approach to detect bacteria on removed spinal implants. Spine (Phila Pa. 1976) 20; 35(12):1218-24.
[0255] 53. Saper D., et al. (2015). Management of Propionibacterium acnes infection after shoulder surgery Curr Rev Musculoskelet Med. 8(1): 67-74.
[0256] 54. Sardana K. et al. (2016). A cross-sectional pilot study of antibiotic resistance in Propionibacterium acnes strains in Indian acne patients using 16s-RNA polymerase chain reaction: a comparison among treatment modalities including antibiotics, benzoyl peroxide, and isotretinoin. Indian J. Dermatol. 61, 45-52.
[0257] 55. Schafer P. et al. (2008). Prolonged bacterial culture to identify late periprosthetic joint infection: a promising strategy. Clin. Infect. Dis. 47:1403-1409.
[0258] 56. Soderquist B. et al. (2010). Propionibacterium acnes as an etiological agent of arthroplastic and osteosynthetic infections—two cases with specific clinical presentation including formation of draining fistulae. Anaerobe 16(3):304-6.
[0259] 57. Stirling A. et al. (2001). Association between sciatica and Propionibacterium acnes. Lancet, vol. 357, no. 9273, pp. 2024-2025.
[0260] 58. Sulakvelidze et al. (2001). Bacteriophage therapy. Antimicrob. Agents Chemother. 45, 649-659.
[0261] 59. Tan, J. K. L. and Bhate, K. (2015). A global perspective on the epidemiology of acne. Br J

[0262] Dermatol, 172: 3-12.
[0263] 60. Trampuz, A. et al. (2007). Sonication of removed hip and knee prostheses for diagnosis of infection. The New England Journal of Medicine 357(7):654-663.
[0264] 61. Tyner H. and Patel R. (2016). Propionibacterium acnes: from Commensal to Opportunistic

[0265] Biofilm-Associated Implant Pathogen Anaerobe 40:63-67.
[0266] 62. Walsh T. R. et al. (2016). Systematic review of antibiotic resistance in acne: an increasing topical and oral threat. Lancet Infect. Dis. 16, e23-e33.
[0267] 63. Zeller V. et al. (2007). Propionibacterium acnes: an agent of prosthetic joint infection and colonization J Infect. 55(2):119-24.
[0268] 64. International Publication No. WO2015118150 Treatment of topical and systemic bacterial infections
[0269] 65. International Publication No. WO2003093462 Immobilisation and stabilisation of virus
[0270] 66. International Publication No. WO2007072049 Particle binding

The application's sequence listing, which the Patent Office published only in electronic form, follows.

SEQUENCE LISTING (25 sequences)

SEQ ID NO: 1 - DNA, 29671 bp, Propionibacterium acnes bacteriophage
tgacgtgactggtggtctgacgtgtgctcttccgatctggtcttgcacgggtgtgcagggggtggttcccgtggggtttgtgggttttttcaccatggaatcaaggtttttgtggtttgttgttggaatttgatgtttggttgtgttctgttgcctttgcttctgttgcatgttctgcagatgatttggccgttgtcgagggtgttgagtcctcccctgctgacgggtgtgatgtggtcggcttcggggcttgttggcagatcgtgtgtgccccaggctatctgggctccgcagagtgggcattcggtttggccttgctgtcgggcttgggtgatgagtcgttgccgccagcgccggtgtgaggcggatgcggtgcggttggtgtgtgccatcgcgtctccgatccttccctagccctgtacgggtcttatttgcctctctaacggcctgggaaccgttgggggtatgaataccttgcccttgccctgctgttcgatcctaggccctgttttgtgcgtttggcggggtgttctgtttgtgccggggtgtttgttttctccactaccccctggcatgtgaaaaagatcacatcgccccccagctgtgtcaaaagaagaaggacgcgaaagaaaaaagggggtggatgggtgttcgcgtttcacagcttagcgcttagcgcctagcgttgaaggacacaggctaagcgggaacaccttaaggttttaaagtcttctacttataatatacactttaagtcttacctggtgttaagggtgttggcgtgacacgccgtacgccttcagccgaacacgccaagccgtaaagggacacgggtgtcagagtgtggggagtgtgcaaccgggagcttgcgaccggtggtacacgagacacacggtgaaaagtccatcagcgttgatggtaaaggttcctcttctcccctgatgaagaaaagaagagaagagagaaagaaccaaagagagtagagaagtaaagaagttaaccccttagctcttctaaaacttttataacttatattatattattatacctataagctttaagacttataggtataatattaaagtttaagactgatggttaactttaaatacttaaggtctttaaagtcttatagttactttaagtgtttaaagcttataagtctttaagtcttaatagttattttaactctttaagtcttaaacactgatgttaagtttatatccttaagtgctaagcctttaaggttttatacttaacttaggtgttaagatctttatactgatgctgagccttgaagggctcagtgctaagtgtgtaagcctttaaggttattaattaactttaagtgctaagctcttaagtttacttaaagtgtttaaagctttaagactgatgccgagcccttgaggggctcggtgctaagctatcagcaccttagcgctaagccctgaggtctttaagtctttggtagactgatggatgtaagggtgaaagccgcgtcagcggatttcggccttgcgtccagctggctacctgtccagcctatcataccccacctgggatgagtcaaactggtggatttggctctataggcgggtttgaggggtgtaaacgggtgtttttggtagtaaaggtccaaaaattaaacctaaacttttccttaaattttcttagagtcttgtaacctttgagggtggttcaggctgaaacccctagccggaacgggtttcactcccggacagctgtcacacttcactcttgtgtcctttccgaacacgctaggcccatcagtgctgatggtcttccctcaggctttcgagtactcgtcgctagggctcctcgtactctcaagccttccctgatggcgtgtactcctttcagggctgtgcctgttcgggctgatgccgagcccttgaggggctcggtgctaactgctaagaccatcggtgctaagcgctaagaccttaaggcttgaaggctgatgctccccctctttcttttaccgtgtccttcttccctcttagtatcccacactgtccacatagttgaggcttagctaaccaggataggggttgatgatctatgccgagatggctgatcgcgtatcaggctcctggatgcgtctagaatcgatcagaattgcttgggggtataaacacctagcccccaccctgcaaggcgctcctaggcgtacccctgaagctttaaacggcatttctgggctacaccctccacgccagatcgacagagcgacctcgagagtgtacaccacgccaggagagtgtggcctatctcacacggtatgagggtgtagattccatgcccagatatagcacctcgacctttgcgatgcaggcctatcttaacccgctcaatcatctgccacactcgctatcacccagacatacccctgagacaccctagaagggccctagaatcgatcagcagggtcaaccctgcataatcctacccccagaagatttcaggcgctgagagaggccataaaggcttaagtgagatacgccacatcccctgccacatcccatgaaacgctcaatccgaatgagcgccaccttgactcccggttgcaacctacacactctagaaaccacaacaaccccccacaatcaccgaaaggagcacaccctcatggatggcacactcatcacaccatccttcaccagcctctacgggcagacagaaatcaacccactccaccccacacacctggcaggatgtgacataggcaacacccacacgtctatcatctgccgcctgtaccgtgccaaagtcgaagaagccgtccggctcatccgacccctgtggaccatcactcttgacggtgcagtgtatggaccccaggactggcagccactcaccgcggatgaggccgaggacctccacgacatgatcgacacgatcgatgtggactccatcattgccgaagccacacgataaaaaccatccacacaccagaaaggaacccgtcatgcagaagatcgccaaccacttcacccagctctacaccccagccagctacgactgccccacacccttcgacctgacacgcctcgaaaacctctcctgcgatcacatggattttgagggcctcgccgaagcctaccggcagagcgtggaagccgaactccacaagctacgccccgacacattcatcgcctccgatggcaccgtgttcagccatgacgagtggaagccgctcaccggaggggaagccacacaactctactggaacgtgacccgcatcaacgtaggccacctcctcaccctgtacagccgataaaacccaaccacacacaatgagtctagaatcgcctagaaaatacctgacctatataatcatacccccaagggctgaaagtcgctctaatccaccgagtcacagcttaaaacacgaaagaaggaccaatcatgcaatggacattccacaagtgcgatatcacaatcaccggataccgaccagaacactgcacagtctgtcacgagacattcactagtactcgctctggcgacatgcaccgcacaggcgatcatggagtcaagcaaggccccagtcgtcgcaggtgtctcaccgtggacgagatgaaggctaagggtatgaagcgtaatcgtctcggctactggactacaggacgtgacctgtcatacctcaaggacaaaacccctagccacacaggaaacgctcacaatcgttgagcgcagccttgacacgaggtccagtcactggaagtattgatcatgtcagcaacgaacaacaccccggaaaggggacaacagtcatgaacaagaaaacaggctacaccatcgccggcgccacagccgcaatcattgccgcagcctcattcatgccagccccagacgacaacccaccactcgcctcacaacccgccccacaggccaccacagccaacactgaatggacccccaaaaccgtccaacagcgcaaagccgaaaagaaagcccgccaggccgccgcagaacagtcactgcgagccgagcaggccaaaacccacaagcaagcccaagcaaggggtgaagaaaccgccaccggactcaccatgattacggcagcacacacctgcaaccgcaaagccgaacagcaagccgccgcacacggtgtcaaatggaacggcaaccccgacatcgacctccaactccacaaaaccatcggtaaagacaccttctccatcgtctacggcgcaaccatgaaacagcccggcgcatccaaactacccgtcaccgtccactgcctcgtcaccggaacagaagaccacccgcacgtcaccgacctcaacatcaacccgcaacagtaacccgccaaggaccgctatgcctctcctctcccactacgctgtcaccaccggactcgccgacacggcacacatcattcaccacaccggcggcacactccgcacagccaccgacatcgcctcccgcatcaacaccctcaacccagacataaacctcgaccaccaaatcaaacagctacaaaccatcgaaaccgacctgtacaacatttacaaaaccatcaacaccattcttcaggagcaagcatgaacacacccaacaacattgagctacacagctacgaaaccttcttcaccagcctagcctggatacagggcggtattatcacatggatgtacgcaaccggcaccagccacaaagccgccctcgccatcatcgccgcatgcgccctcaccaccctcctaggcgcctccacactcacctaccagcccaaaaacaacaaatgatcacaacacccatccttatcgcagaaacccttgccatcattattctcgccgtcgccctagcccacgacaacaaccagtaacccacacttaaggagcacacatctcatggatgagccaacccgcatgtacaccgaccccaacaccggagcccaaaaagaactcaaactctgcaggctatccctcatcgaccccgcatccctccacgccctcggcgaagtagcaggctacggctccaccaaatacggcgacaacaactggaccggaggatacccgtggagccacagtgtcgacgccctctacaggcacctgttatcatggcagcaaggcaacaacctcgaccgcgaatccgggctaccgcatctggcccatgctgcctggcactgccttgcactcctcgcctaccagcaacacaatgccggccaagacacccgcaacccatggaacaaaagcgacaagtaatgcctctagcacaatatccgaaaaccatcggccatccaggccacatctcctacagttcactcacccagtgggccgaatgcggagaaaaatggcgcctctcgcacggctaccatgcccaacaccacacctggtatgccaccatcgccggaagcgccatacaccacatcacagaacaatacgacctacacctgtacaatcccgccgaataccctgcactgccagacaaactctcatccttcaaaaacattttcgacacccaagtcgccctcgccgaatccgaaggcacagaaatcaaaccctccggcagaatatgcaaaaacatgtgcgagtcgggcgggccacacaagaaagactacaattggtggatgatgtacgggcaaacatttgtggaccgctggaaaacatggaggcgcaaccacccagaatacgccaccgctgttattgacggcaagccaggcatcgaatacccggtagaaaccatcctcgacgatgacacaaaaatagtcggctacatcgaccgcatattcaccaacaccgacaccggcgaaaccttcatcctcgacctcaaaaccggacgcctacccgccgacagtatgcagctgcacacataccgatacatgctcaaccaacacggcaacgatgtgacaaaaggcatgttttggacgccagccaccagccgcaacgacgacaagtccccaacacaaggcacatccaccgaactctacgaccttgacaacaacacctaccggcatgtatcatccatgtacagtcaagcaatgaaaggaatcagtgaaggcatcttcgtcccacacgtcacagcactctgtaaaggatgccccgtacgagacgcctgctgggccgtcaacggcaaaaactcgtacagatatccggtagaatccaccgtgcagccaccagaaacagacaataaagaaaaggacaccaaatgaccgataaagacaagatcgacaatgatcgactcacgatcacactcaaatatggtggagactatgctgcaccatgggcggtcatccgaggagacacagcagagcagacaaaacaggccatcatcgacctgctaggcggactcaaaaacgatgacgtgtccaaagactgggatctagcaacactcgtagcgagcgcatcaatcatcctccaagaccgatacaaccaggcagccaaagactacgtcaacaacatcacatccaaagaaaacaccatcgtcatcaacaaaatcaacaatgcaacaagcaaggcacagctagccgaccttctaaaacagtacaaaaagatcatcaccagtaacagtgacgtgtcagaggctttccgcagcaaacgaaacagcctcacccgataaaccaatataagacaacaaaaacagacacaacagtaaaggataacacaatcatggcactcgccacctaccgaaacaacaacagcaacagcaccttcttcaacccctcccgaaaccaggacgccaccgccatcgccttcaaaatccgcgacgttcagcacaacactgaaggctacggcggacaggtcgcagaccgcatctacgctgatgtcacaatcttccacaccctagacgatctcaacaacggcaccccagaaaccatccccaacgctattattgagaaagcgcgcggcaacaacgaccgcccacactccatgatccgcgacctagaagcctaccttggcgaagaacaggcattcaaactcgccaccgtgcgcaccaaaaacgggttcaacgcggtcatcctcaaaccattagacgacgccatctacgataaggttgccgaatacgtagacaaacgcgataacggccagctagacgacaccacagcctcaactgatgctgacatcgatatcgactccatctgaccaccaaaacatcatccaaccgatagacagatagattaaggctccgatgctctctctccaacgatccttcgagagagcctcccaaaccgcagccgaactgccccgcataccacaactagaacccctctaccgcaaccaggacatgcacatccacaaaggggatctcgtcatgatcgcggggcggtccggcagccaaaaatccgggctagccatgttcatcacagcaatgcttaaccagcccgccctctacatatcaggggacatgacaccctgggaggcctccacacgaatcatctcactcaacacccaacacaccaccacacagatacaacacaacatcgacgactacgggccagaatactatcgagacagcatccaccacggccaacacatcaccttctcattccagtcacccatcacctggaccgacatcaccatggaactgcaagcctacatggaaatgtggaacaccttcccacccatcatcgttatcgacaacctcatggacatccaagactgcgaaagtgactaccaagcccaacaagaagccatgcaatggatcacagcactaggcagggacacgggctccaccattattgtcacacaccacgcaaccgacaaaaccggctcagacatcgaacaccccccggctaggcgggaaatcaaaaacggcctctccgaaaaaccacaactcatcctcggagtctcactttatggtggcgaagataacggcaacgggctcaccatccccgccgaggcacgcatcgccgtactcaaacagcgcacaggcaaatccagcccagacggaacacgatacgaaagactcagagcctaccccgaatacacattcttcgggcccctcgccgaaaaacagccatggaacatgaccgaacaccacaaaggactatcatgtcgacacaacagtcacgcaaccgccgggccggcgcagaatgggaaacacgactcctccaccagctacgcgacaccggctatgatatagaacgcctccacctcaacggtaaagaggatgaaggcgacctcatcctcacaaccggccacaaaacctatgtgatcgaagccaaagccgggcaaccccacctcgccgaattcgtgaaacaagccagccgggaggcacgcaactacgaaacacaccgaaacaaacaaaacaattccaccatcggactcgtagtgatgaaacagcgcaacaagccatggagcgaagcctatgtggtatcaaccctcaacgagctcctcccacacctctgacacctgccacctcctcgacacctaccagatacgctacaacccgtccaggaacgagcaacacatcctctgcccgttccacgacgaccaccagccctccatgagcatcaacctcgacaagggcctctggtactgccacacatgcggtgtcggaggcggactcgcccaactgaaacaacaattagagaaagaaaacccgaatgtacgacagcctacaaccctacaacattgcggaacgccgccgaatccagaaagcctcagcccgctacgaaacccacctcgaaaacatactcgacctgctctcggcaagaggcatcagcgaagaaacagcccggctccaccaccttggatacatcgacaatgaccccataccaggccacgaagactacaaccagtgcatcaccatcccctacatgtaccccgtctggggggagccagccgaaatacgaaaaatgcgtttccgctgctcactcccacacgactgcaaaacccacaaccaccccaaatatctaaccccggcaggggacacaggctccatctacaacatggccgccatggccaacccggcagccgaaatgcacatttgcgaaggcgaattcgactccatgatcctcgaacaatgcggatggccggccgtcgccctacccggcgcaacctcgtggcaaactttctggaccaaattttttgaaggctacgaccgcatctacatctggtccgaccccgacaaagcaggagaccagatggcccaaaccctccaaaccgcactgtcgcaagccatacacgtacccctcactgtcggggatgtcacagacacctacctgaaaacaggcaaaacagggttgacacaagcactagacacagtgctacaataaaaccacacaagcaaccccaacaaagaaaggcatagaaaacatcatggaccccctcgacacatgccccatccccggccgccgcgacacctctaaagccgcccggaggcgtatccgcctcgccatctgtgcagaaaaatgggccgacggcgtggacccactccacatcatgcacacctggggcaccacctatgatgggatgcgatccatgatccgcgccaaccccgacattaggctacccgacgacatggcaaaacggttacacaaaatctgccgggaagcctaccccaaaaaccagcccaacaggcaccgaagcggatgggaccaatacgaaaaagactactacacggaggaaatactcttcctcaactccttcaacgtgccagccatcgacatgctcaaacgactcgacgtgtcatggaccatgtggaaacacatcatcaccgaaaacaatctcacccggctccagcaagaaaccgacaacgcctgccaatgggcaaacctgcgaaaacagcaccccgacaaaaccgaccaggaaatcacccaaatgatgtacagtaaccaagtaacgttcagcaaggtgatgaaaaccatacccgcataaacatccatgacaccagcatagtatttgcacactctttcacacacaggagacatgatggctactaaaacccaacacttgatcgacacaaacagggacaacaacggcaagtttcccgaacacctacatgacgtcatatgcggccgtgccatcatccacaatgccggcgaagtctcatggtgcacacgcaaaccaggacacgacggcgactgccgcacaggatggcagcccaccacacaacccctaggacatcatggcaaccaaaactgaaaccctcatccaacgctacggcaacaaagccgcagacgtcctcgccgacaaaaccatccccgccacacagctagcccaaatgctcactgaagccggataccccatctccgccaccgtcattaaagactaccgccgcaaacaagccaacaccaccccgcaagaagaggaaaaccagtgatagacaacatagaccggctactcacacaactagccaaccacgacaacgccatcgacaccatcgacgacaatctagccaacggcaccgtacgccgcacacgcatctccgaatggacactccccaacggagaaacaggccgatccatacaaaaaatcatcgaccaccaacccgcaacaaacccctaccctgtagacgaactcgtcaacaaactagccgaatggacacccccaaaaccagccgacaacacccacaccgactacagcactgcggccttcgtcatcggggcaggagacttccaaatcggcaaaggcatccccggcggagaaacagcacacttcgccgacaactacctacacaccctcatcgtcgcaaaacactactggcagcaagcaggcaaacccgaacgagtccacatcgccttcctcggcgacatgatcgaaggatacgtgtcacaaggcggcaacaacgcctggcgcacacaaacccccctgacggaacaaatcaggctcacccgcatggccatgatgcaactcatccaccaattcgaccactgcaaaaatgtgaccatcacatccatccccggcaaccacggagaagccgtacgcttcggcaaaggagtcaccacctacgacgactccttcgacgtggactgctgccgcgccatcgcagaagcctaccagctcaacaaccaataccccaacctacacttccacttccccagccgagacgaaatgaccaccaccgtcgacgtggccggcacacaaatcctgcacgcccacggccaccagtggcgcaccggcaaacactatgattggtggcgcggccaagaattccacaacggcaccgtatctaatattctcatggccgggcaccggcaccacctcgaaatctccgagcaaggacaacgcaccttcattcaatgcccatccatggaaggcgaatccacatggttccggcacaagacaggcaccaccggaaaccccggactcgtgtgctacactatcaacaacaaaacaccaaacaactaccagatagccaggtaatagtgccatgagcagacgaccaacaaaagcagacctagccaccaccgcatcgtgggtgtgggccacagaccagcatctacgcacactcaaccgggcatgcaccaaaacagccgcacactaccccgcaatcagcgcagacgacctctaccaagactccctactatatattgcagtgcgggaacaataccacaacctagacaacaaacactacaccaaaatgtgctacagggtagccaaacggctagccaacaaaaccatacaacacctagaccagccgaaacctttacccgatatcattcatctagccgacaaccaaaccagcatttaaaaggagaacccctcatggttaccaccattctcgacgacggaacccaaaccaccaggctacaaacagtaggcgccaccaccaccgccatcatcaccaacacagaaacacccgaaaccatcaccgccaaatacaccatcagtaaagacggcacagccacctacagcatcagcggaaacacctacctcggcgaccaccaacacattatcaaactcatgtacgactactgccactgcgtcggacgattcgacaccaccaccagcaacccagacaacctcgacaacctattcaaggggtgaccaatgcaccaaacatacaccaccgccgacatcatccaagccgcacaatggatctggaacggcggaccatggaaaccctccgtggagccaggaatgccacccccaccaaccgccccccagcatcacggcaacaacattgccaccatgatcgatctacagctagccatcgacgactacaccctcacctgccagccatccaaacagcgaaaacatttggcacggttggcagcattcagggaagtatacggatacgaccaaacctacgccacagccgcccaacgactcggggtgacaagacaaaccgtgaaacagtgggcagaccaaacactcatcaccctcacaggctacgcaaacagtcgatactatccagacggcaacgacggcagcacagggatgggacaacagccatgaacaacacacacaacatcacctacaccaccctcaacacagcgatacaccgcatcgtccaacaacagcccaccaacatgcaacaactacaaaacattgttgacagtgtcgaaaaccagtacggtgtacccatctccctcgacaacgtgaaccttaccgtcaacaatgtcagcctcgacgatctcgctatcgaccaggacacgctagacgagtgcagcgaaatcctgtggctatgcgacagtgcaggacacccaaacaacaacagcaacacccgtggcaacagcgaggaccagagcccctatgcaagccaggaggcgctagactggctcgccggaatcgcataccaagccaaactactgcaggcggcagccgacgagatcatgtgggctatcatccgccaccgcgacaaccacaaaaacgttatcggccggaacgttctcgaccaggccagcgaaaccatctgcacctgcctccacctgtatcagatgctcgaagacaccatcgacatcaacgaatcatagaatactatagaacataaaaatagtgccccagaggcaaccaccacacgatcgtggcagcacctctggggcacacacatattcaattatgcaacagtagactctaccgtgccaacctcagactcggcagcacgccgaggctcatagccgacaacatccgcatcatccatcggctcaatcatgccaggatccgacacatccaccaagtgcggctcaaccatgcccccatcatccggtggaaccaaacccgcatccagctgaggcttgccgggcttgccggccacaaacgctgggctaccaaacgatgtagcaaccgacaacaccgcagccaccgtagctgtgatcaacgccgattcccacggcaaaccgcgaaacgactccgcagtatacgtgacacccgccgtcacccccaacacagcaacaaacgtttgcacaaaagtcttagccgcccgttccagtaaacctaaccaaaactgtttacccacaacaaaccaccatcactttttcaaaccgttaacagcagactcaagcctgtcaatacggctgcgacactccaacacgtaataccagacactccacagggcatccttggtgcgccacagcttccccgtcaccggattcttcacccacgacagggcgtcaacacgtttacccaaatcaccattctgaacctgaaccacaccaacatcatggtgcagcttattcaccgaaccagtaagctgagcagacaattgtttaatctgatcatgcaaggctttcacatcagccaccgttaactcctcactacttgaaccgccgccatggccattcaccacagccataaacctgtcccacggaaaccacggccccggatcatcatgatccgactgatgccacgcatccgtaacatccacatgcccgcacacaccccgcctgccggccttcaaatcggatacgctaagcttccttttcggaacaccatgcttgtcacacaactgccggcacagcaccgccgccctttccaccgcgggccacacccgcggatccagccactgctccctcgtgtaagcatgccctggtacacggaacgaggcgtgcgaacccccatccgcgcaaatctctatacccaaagaatgcggattcggcggggcatgccaaccaatcgtagactccgacaagcactgcaccgtctccccaacatcacacacataatgggcagaaccacccgacgatggggaagcaaaatagttcgctgtagacaccgcccgccccttacgggaagcggacggaaaccccacatccgggcatgttgcatgaatcacaaccctattcaccggactattcgaaccggcagagtgatgcgccgctggaatgtatctcaccacacaccaccaccaaacacgaccaacactagtaacacccttccctcttcttgttcacctatgggatgatacggtaaccacaggtgatggtttcacactctcgcaggctgcagaacccgacacggtagaggccgtaccgtcactatatttcacaaccaggcggcccccggaacagtacacagacaccacagagcgcccatcagcgccatccttaccgtctttaccgtcggatccgttcacacctgcggggccacgctcaccacgctccccctgtgcgccttgcgggccggcaggacccgaaggccccacatcgccgcgctcaccagccgaaccatcacgaccatccttgccatcagcgccgttcacaccgtccacgcctgcacggcccgaaacaccatccttgccgtcactgccgggcagcccgtcaggacccttcacaccattcaaacccggggaaccctgcggaccaacagggccaaccagcccagccgaaccatcaacaccattacggccatcaacaccagccggcccctgcgggccacgcacaccagcaggaccaggcacaccctgcacgctacgctcaacacgctgagcatccacacacaaaccagaccggtgaagacgcaccgactcctgcccgccagaagcacacacctgccgcacacgggcagccaaccctttagcggctgtaccattagactgggctttagcctgctccgaatccctttgggaagccacagacccataccgcaaagcacccccggcaaccaccgccaacagcacaagcgacaggaacaacagtatcagggaagccttctcaaacgagcggcgctgccgcttctcttcctccaactccctcacaattcaccccccaccaccatcaacagtatccttcaaaaactcgggcaaatcaggcatctttacaggctcaacattctccggcagattcgcgttatagcggtgaacagtatggcgaatattccacgtgtattcttccatcgcatcaacctgcgcagacaactgcctcagcctcttcttcgacctgtacgtagccgcctgaatcgaaccaagaacagtagcgatagcggtacaaagagaggctacgagtgtgggtgtaagccatgacactacagccccctaccactacaacaaccacaacacgtcacatacccgcaagccgtacattacacgccgacagcaatccagttagcaaccgcaggcacatcagaaggcttcgaaccatcattcgtaataaacgccaactgaaaatccttgctagtaatattgtaggctttcacatcaatctgctgcgtaccaccagccgccgtagccatagacgccaccacaacaggcgcactaccaaacgggcggccaaacgggatcgtgtaagcatacacagcagacccgccaaactggatctgcttcgaacccgtttcgatcctgggggacagtagcatccactcgttagcatggttagcccacacagcccccgaaggaaccatcacccggtcaccctccacaggggtagggtcacaggctgcagactcgccaaacgccacacgggccgccacagcacgcctatccaactgctgctgcaacccgttagacgacaccaccaaagtcgccaacaactgctgatggtacacgccaggctcagcccttaacacgtcacgggcacgctccgcacgccccccaggaacaatctccaacttggccgtattctgctcccaatcccgagacaggacaacatagtcgtatcgggtctcgccagggccaggcagctgccctgtcaccgtctcaacactattcgacgtgcacatcaccccgtgagcccaagcctgcccaggcaggaccgaacacaacactgtggcaccctgaaccgtagtgcccacacgaaaatcgtccgggcccttcacggacggcatattacccatcagaccagacatttgagcccaatcatactcggtcaacacaccatcaaaacccttgcacacaatacccacaacaaaccccaatcacttactaaaacttttgcaaatcccgcacacccgcagccaaatcagccacacggcgagccaacagggccgacggattatcctcataatccccggcaaccggagtcaccttcgtccacccgtcaccaggcgatacacactccacatcaatctgccgaacaatctccgcaataggccccgagcccacatccacatagatcaaatcacccggcatcagattgcctggcccaaaacgcaacacatccgactcagccaactcgatcttaaaccccgacgtggcccccgactcggacaacacccgctccgcctcatcaatgagatgcacatgctcagaatccgtgttacgggcatccttaaacacctcgacacgatcaaaccactcatcctcggccaacgcgtcaaaatcctcacaaaacagccgatctttgccctcaccacggccacccacaaccaccgacgtagccttcggggcgtcacgcacatactcccacgacacaatagacccagactcggcagtcaacacatgctcacgcgtcacagcaggcacacaatcaaacagtaaaccacgctgatcctgcttcacattctcaaactgtttcaccgtgacagtcatccgagcccacgacaacaccggcaacaacttatcggcaaacacgtgaaaccgcgcctgaaaatccttaatatagcggccacgactcttatcatccaccataaatatatcaggcggaaaacgccaagtattatccctcaacgccttcttagcgaccgactccgccgcacccgaatagtgggcataatccctattggcacgccactccatcccaatgatgctggaacgataaggcacaggccacatcagcatacgccacaacaggcggatatcatcctcacacgtgatagtcacccgcgaagactgccaaggacccacaccatgaacccgacgcacaggcccagaaaaaatctggccaccaccataatcaacaaccagccgtgcacccggcctagtcaacccgtcaagcctagaatgatcacccgacaccaccaactccaaagtggacaaaccattccacttcaacgacaacttcaacgactcaaaaaaattgataggcgccacacggcgataatccggcgtaaacaacgttacatgcggaacaagaccagccatcaaccattcaccaagccctcaaaaacctgtactgcaccgacacaacaatggcacccaaaccaaccatctcaatattcacactcttcgaaccgccaggcgggataggcgcaaactcccactctgtcaaacgatccatcacatcctcaaacccgttcaacaacgccgactgctggcgaggatccgtgtcaatagtgatccaatcatactcctcgacaggataatcagaagacacacgcaaaccatcaatctgcacagaccacgactccaacgggccctcgacacgaatcacaggccacgcaggcacatcacccttattcgacaggttatcccaacccgagcccacacccggtgttaacaccacaggaaacgcggtaccatccttgccgacagggccgccacccaaccaatcctgcaacttagcgttactaaaacgaaacttctgctcatccccataccaaaacgggtcataggccgtcaaatgaatcacatagcgggcatagccgcgattcaccggatcaaccgtaaacgtgtcatccaccgaatcaaaccggcacttcaacacacgctcaacaccggcaggagtcttcaccgacaactccccctcctcgccgggaggaaacgcagaccacaacgcgtcataggctttcaaaaaaccgtcacgaaacccgcccaccggatccgggtcaacacccgacaccaaaaccggcagcgtcacctcgcgaggcttcacattaaacccgcgccactccgaaccgtgcaccccaacatgagtttgagaaaaatgctccacctcaggaacacccaaaccgcgcaacgaatcattcaacaacatgacaggagacgcacccgtataatccgtcaaatgaagcacacgctcgtcgccaaaccgcggatccatcgaccatgtcacagtcaaaccagaacgatcagacgggtcaggaataaacatgcatacccctttactcacatgtaagccaacgcgttcaaagcgtcacgctgctgccgctcaatccgcttcgcaaactcggccggatcaccatacgtcgggccattcacattcaccacaacactctcaccctgagcacgccgataccggtcgtacggggtaaacgagcccacagacgatcgcacaccaaaccgggcatcaacagcatccggaagctgattccccacatcagacatcgcatccaacgccaaacccgcattcccagtaataccctcagccaaaccggcaacaacctgccggccaacctcgtcacgaaacacccgcgacggggaatgaatacccaacacagacttcgccgcacccgcaatctgggaacccatattacgcacagtatccaacaggccactcaaagcattccggataccgttacccaaaccggccaccacatcacggccagcagacaccaacaaggaccccatgttacccaaggcgcccctaatattactgggaagattccggaaaaaccctatcacactatgcacaccactagacacagccgagcccatagcatgcatagcagaagaagccgcacccctcgcagcgttaaacccggacgaggcagcaccacgaacccgagacgccatcgaactgaaaaacccgccaacagcagacgccaccgaagacacaacactccggatagcattcatcgcagccgaaacagcgccacgagccgcgttaaaaccagacctcacatgggaggcaaccgaagaacccagccgggcaaaaaaccccacaaccgcgttcacgccgccagaaatcaccgacttgaaaccgttaataaacgcagacgtaaacgccctaatatgattccagccagcctgaaccaccgaacccatacgtgccaaaccagacacaaaatgggcaacaacccacgagatgacacgggcaacagcggcaataacacgggccacagccgacacgacagcaccaacaatacgggcaacaaacccgaccacggccgccaccatcggagccacaacagcaacaatacgggccaccacctgtatcacaaccgcaacaacctgaaccaccacacgcataacagacatgatcaccggtatcaacgaccggatcaggccaataatcggtggcagcacagacatgacagcacccaaaatctgttgaatcacaggcatcaaaacaggcaccaactgcatgaccacgccaacaacctgccgtatcacagcaacaacagcctgcaacaccggcatcaacgccggcaacaacattgcagcaacctgcgtcaccgcaccaataatctgcgtgatcacaggcaccagccgggcgacaagcataccaatcacaggcacaagctgcgccgctagcccggcaaccaaaccgataatctggccaaacacgggagccaaccgtgccaccaaaccagcaattagaccaaacagcggctgcacagcggccatgatctgccccaaagcctggccaaccacagccacaagctgcataacagcggcacggaactgggcgttcgtagcaaacatggcagcaaacaagccgatcacaataccgacagggccacccagggcgcgaaacacgccgccaagcccgccagcggcacccttcaaagcaccaaacgacggcaacaaattcttcaacgacaccgccaacggggcaaaccccgctacaagcttccccacacccgcagcaacaacaccaaacacggccgtgccgccagcaaacatggccgccaaattaactttagggaccggcaaatgcattctcgcaaaaatgcccttcaactgctccgccttggcgcgcatctgtgcattcattcttgtgatcatagccggcatccggttaatccacgccaaaatagacggcatcatccgctgaatcccctgatccaccgacgcaaacaaaggcttcacagactccgtgatagacttaataaccggattcaacgcaacaaaaatctgccgcaggccgttcaaaaacggggccatagccgtagcaccaagatagcccagggcgctcttaacattcttcatagcgccctcaaacgtcttaccagacgcctgcgcagcaccacccatgccaagcttcatcgcagccgcaaacgtgttaaaatcaatctgccccttcgacaccatctgcgacacctcagcagacgttttaccagtctgcctggcaagcaaagacagcacaggaacacccgccatcgtaagctgcaacatgtcatcgccctgcaacttaccgcgagccatcacagacgtaaaaatagcgcccgtatcctgaaacgacttacccgaaatataagacacatcggcgatagtcttcaacacatccgtcatctgcccgccagacttcacacccgaagcagacaacgccgccgcagtagaagccgcatcacccaacgcatacgacgtaccagtcacagcctcaatagccgaattcataatcgaagacgtgtcagaagacgtatgacccaaaccagtcagtttagcctgagcctcatcaatagccatagcgcgagcaataccgccaccaatagtcacatcatagatagacttgaggcccttcttagcaacattgatggcacccaccattgcggcgccacccaaagccagcttcatgcccttagcaaacaagctacccgaacgctgaccctcagcaggcataaccccagaaagctgtttaccaacatccgccttcaaaccaggcatcttcgtatacaacgacacatatgcggaagcaatctcaccagacatacactattcaccccataatattaatctcgcgagacaccccgccaccggcacgaacacgcgccaaaatatcgtccacctgcccagacgtaaaccgggccctacgctcatccgtaggcctcgccacaggctccggctgcccctcactattagcagacctgtaatgatccagcatgtccagcacagcccactcgcaccactcaaacgggcgctgccaaccattcaggtgggccgccaactggctagacgtatcggtacacaacacgccagccagccggacagcctcaccccaacacatcaccgggccaccaacactataaacagaaacaccaaacttggtgcggaaatcgtattcgatggccccacgataatcatcaatcaggccgtggagccaaactattcccccagcgaggcacccttaccgtcaggcttgtattccatccactcacggaaaatctcggcaacacgaaccataggaagcccctccagggcctccaccgcgtcagccggggcggcagcctccaacatagaaaacatcacctcaacctgggcgaaatccgcagactcccccgactgggcaatcttagctgcacgacggaaaacgcgggcaggaacagcctgagccgtctcctccgcatccgccaacacccagctacggtcaccaatcttcaacgtgtaacctgtgtcactcatctatcaacaatccctaaaatcgtgtatcagttctcagacggcggattcggatccggctcaggcttcggagaaggcggaacaggaggagtatcagcttttaaagccgtcatccacccccgacccgacacagcattacccttcttattaatctgggcaggatacgccttcaatgtcacaccatacccgtacacttcgccattcttacccttgatctcgtcacgatcaatcaactcgacctcagggaaatagtagcgaataacctgatcaccatccacaatatccattaacagggcgtgaacacccgtcgtggcaccaggagaaatatcgaacgaacccgaatcggatccggcagtaaccttcgactgccaaaacagctcgataacctccttcttagactcgatcagctggaaagaaatctcgatagaagactcggtagcaaccgtgcgaacaacatccgcattctgccaagccttcaaatcatccgttttacgctcaggcttaatcttaaacccgtcatcagacaaataccctaaagctgtaagcccggaagggaccgcttccacacccttaatagtatcacccgcgtgcgcgtcaccaatataaacgtcgccagtaacagcagagcgaacattagacgctttacgtgttgcagccatcataacccccattaaatatcaaacaattacattaaaacaaaaacaataagcttattcagactccgcaggcctacatataagctcaaaaagcgaatacacatcaaaacgtgcaccatcaaccagcaaatcagggccagtagaccgtttacagtacaccacagggtcaccgtcaaccccatccgccagcaccgcctcaacacgacgcgccaacgacatagcccgatccggcatatcagaaaacacattcacccgcaaaaacactcgctcacgcacatgcaactgcgggccaccatcaagagccaaccagatcagatcacccgtaaaatcgtcaggcaccgtccctgtacacggtatatcggacagccagccatcatccgccaggacacgtttagcccacacgcgaggatcaccgtaaacaatcacgacgcagccccaatcgaacgagccaacgtgccatgcttcgcctcaatacgcttcccacccctataggtggtaccaatcctggcgacagcctcaacacggtgaacctgcacctccgacgacaaaccattacggtattgggccttatcgaaagcgttcccgcccacattcgccgaggccgcacgcttgacacgctcgccacgctcagccaacatagactgcaccccaggagacttcaacacctcacgaatacccggcaagttcagcttcacattcacatcctggaccacaatccatcagcccttcttgcgcttcacattaacctgcgtaccagcatcccaaccggacatggggtgatgccacacgataggagacccgtcagcctcccacacaacaccccgaatacgccaccggcaacgataatcagcgcccacaacaggggacttgaaaagcatcgaccaatgctcatagtcagagtcacggccagccgcctcatcctcctgcgaaacggaagcatagatggccacattatggtacacagtctcgacaggcttagaccagtcttccaccttgtcaccaagatcatcgacacgaacagtcggttgaagcatcacaaccgtttcaccataaggaaaaccggtcatatcatatctcccacaaagggccagcgtagccgttaatattcgacccgcacgagcaaccctcaccccacaccgtggaacacacctcagaatgtgcatatccgccatgaatggtcggggtgatagtgaacgctttaccagccccaccatcaccctcacacaacttcttcaacgcggcaatctcagaaggccacaacaaattcgtgggagtattagaccgtgtagtctgagcaaaagggcccgcagactcatactgcacctgacccgacacgccagtatcattccagcgcaacaaagccctgcgcagaatagccttagcggcatccctatatttgaaatccggtttagcgatacagggggcgacactgacagccacagcctccacatcggcaatcatcgcctcaagcttccccgcaggaatatcggcgaaaggctcaatatcctcaggcctcaaaatgatacccatcaacaccaccccctgcacatagaaaacatcaccgcaacaaatgaatcagttaccggccggcggattaggcttcggggcagccttctccttcacaacagcaaacgaatcaagcgactcaatcgcaacatacagcacagcctcagcacgaaccataacctcattatggcccttcaagtcacgaccagtctgatccggatcaccatactcgatcagctcgatcgggaagttacgctggaaaccccaatgaacacgagagaaatcaccaacaatagccttaacacccgaggcaggcgacatctccggggcacccgaaacagtcgaagaagcaccaacattcagcccacgccaattatccaggccagcaaacccggcggcaggatacataggctggccggcaagcggagaccccttcggatacacctcagtagacagagcaaacgagaacgccggatccaaagcaacaccgttaggaacctgcaaaccagccccagcaatcaacccaaccgccttaaccagatcggtcgtagcggaatcggtggcatcaaccgtcttattcgtcttatccagcgacaccttgacagccgcagcaggcttaccagtggcaggatcaataccatggaaagcaatcagatccacggcgcgaccaatcgaagcacccagggcaggcgaaatcagatcctgcaaaacacccagacggtaatcggcatcagcccacataaactcgtccgagacacgctgctgagtcacaaccttgataggctgcgcagtaaacgccgaaacaccaaccgaagcggaaggcttaacctcaccctcaccaacaatcttggcgcgaggaacaccagaaaaaacggcacccttcacgggcccgaaaatagtcggctgctccggcgaaagcttcgccaaaacaccagaatcgatagcacggtcacgaaccgcaccaatcatagaaccaggaagctcaagcttccctgcagaaagaaaatcgtcagccatcagaaatcatctcctagaattattgacaagagcatccacaaacgcgacaccctcacgtcgtttaacatcatcaacgggggcactccccgcaagacggcgcacacccgcgccaccactactctggtcgatcaaacccttcaaagccttagcagactccaccagcgcttcacgatcgctaccgtgcaagaaagcgaccgcatcacccgacaggccacactcggcagccacatcacgcttcacaccctcaagaacaaacccattaatcctgtcttcgagttcctcattcttgcggcgaagctcatcaatagtagaccccgcatcaccatccgaggcgcgaagcttctccaactcggcgaaattacttttagcacgagactcccacttacgggcctcagccttccaatccgtgccagaagaagactcctccttcacggaaacatcaccggcatgatcatcgccggcagcctgcccatccttcacaacatcaacaatgtctccaccctttccgggctcaacagcatcattgtcaacattctgttcttcaactttttgatcggccatagcctaaccctatactccttgcggaaaacaacacaacattgttgacccccgtgcgggagacaaccctgtgcaccgataaccggcggcacacaaccggaaaccacatcacattatctcatgccaccaacagtacgcatagccttcaaaatattgccaggcgactgctgcaacccatgatcatcaacccactcacgggccttctcataaaccttctgatacccggcatcagccctatttggctcccaagggccaacaacctcaaccaccgtacaaccacaatgatcatgatacttagaaccaaacggacgcctaccggcacgcttatgacgccgcgtatgacccgcagtaagcgcccgctctttggtcgtataatccgacctcgtagccaacatggcacaaaacgcgcacggatcaccatccgtcaccctgcgccacgacctaccctgcgcacccgccgaccactcaaccgtgtcacgaccagcattcatcacagcacgatcaaaacccgccgccatcgcaccaatcgtgtcattcgccctatccgggtcactcttaagaatcttcatagtcgaaaacgacctagccaacgccgccgcagcatcaaactcgtcatacacaatcaaacccggatccacaccattcaaccggcgaaaatccgacacaaacctggcagccaacgacgccgaaccatcatggccggcacgctccaactccacacacaaacgcacatactgcgcatctgtcatcttcccggaatgccacaaacgaccaagctcggcataatagcccgcatacttcccagcaaacctgaccgcctcacgctgatacccggcagcagcaagcctcgacgcaacccccgaagccattcatcaaacctcgttagtttgacgagaaatagccccagccagcgccgccaacggatccgaagactcggcacgatgacgcatcacagactcaacctgcacatcatccaaacccaacatctccaacaccgtacgagaatcagcaggcaaaataccggcaccaacaagcttcgtcacagcatcagccgtagccgcccgagtcggcgtcgaagcatcacgccaacgcaaacccacatcaccaaaaaacgcggcctcatcaacactcgaatcaagcgccctggcagccaggaaaccaaccgacaaccaaccctgaccaaacgacgtctgcctgcgttcagcacgcttcacaagccgagattcctccgcagccaaagcctccccagaaggcgggttagacgtgataaacccgaaatagcgttccggaacagccgcctcacccgcagtcaactgcgccaacagtctcatctgatccgaatacggtgtaggcgaattcacaggaaacgaccccacattcggagtgtcaccgtcatcatccttatccacagcccacacagaagccatcgacaggacccagccaggctgcgaaaactcatccgcgctcacacccgtaacccacctttgcgggtaggcgtagaagtcacgattcacagactggccaagcaaagtcctaaccgcttcatccgtgtaggcacgaatcgaccgagtgatctccgaacggccatcaatcctcgacgtgcgacgccgattcacaacaggcaccaacggaaccgcacccaacacattctcaatacggcccgtctcaacccactcacgagacccacgccgctccacctgaacaatcaccccaggaagcaacaactccgcctcaacaacctcaggatcacacgtctgctgcaccacaaggccagcatccaaacgagacccgtcagccgaaaaccggccagtacaattcttcggtgactgcggacgaaccaacaccgacccatccccctgggggataacagccacaaacgacaacccaaaaattagtgcatcaaggtggacgtcacacgacgccgtagcaagccgattcgcagcatacacaccatccagaccgtagccgtcaccattcgtccagccaagccaatccagacgctcctccaaagcatccaccgcaataccaggccacgacaccaccgtctgcacccgctgcaactccggaggaatagccacaccaaggtcacgcacccgggcagagccctcatagtagccctcaatacgacaatgccacgaagacaacctttgaatacgatcaaacatgccctcaatcagagccaactcatccaagttcataccacagacacccgcttcctaccagaccgttcacgccgcttcactttaactgttttcgcaccaagatacgccagcgacacagcctccaaaggaacctcagaaccatccttaaacgaggaaccccaaccccacgcagaccccttacgcttctgcacagccgacctcacagcaatatccaacatgtcacggcgagaatcagcacgaggatgagacaccacacccgacctgacaccctccaaaaacgcctgacacgcctccacatacacgccagtatcggcaaccaccacgccacggcccggaacaccacgatccgtcaacgccttctgcaacaacaccgcaccagaaccggcaaccatgatccggtcagtatcaccccaacgaaccgccaaccagtcagccaaccggcccacaccatcaacaatcgtccccgacaggccatcaataacctcaacatgaacaccagcatcagtccggccagcacccgccaaagcaacccgatccccagaacgagaaaacgagacaccaaacactttcccgccaaccagacgcgcctcaaccacagcagactgaacccacttatcagcaggaacaacagacgtagccgactggccacgatcccaccagccaagccgctcccgagcaaacccggcagcagacatcgactcatgctcatccgagaccgtcccaaaattcaggcggcgacccagcgcaggattcgtatcccccgccaacttcctccactgccgcgacacatcctccggatcagactcgtcaggaatcgaaaactccgtccacgcaaacctcttaccacccgacaaagcctgcccacgcaaacgcaacacaaccgaaccatccgccaacggcccaggcggcgtacccaaaaaaatctgctgaggatcaccagacggagccgcagacaccgtaggaagcaaagcctccaactgctcatccgacaactcctgagcctcatcacacaccaaatcatcaaccgtaaacccgcgagccgaaccccgagaacgggccacaaactccaccgaaccccaacccggacaaccacacttacgctcaaacgtggcacaatccggatgatgcaacacaatagcctcctgaccattcgtcgcacgaatcgacttcaccatacgatacaagtcaggaaactgccgctcattctcaaaaaacgacctcaaccgcataaacgccttacgagccgacttcaactcatgagccgtatgcaaaatacggcgaccctgaatagtcgccttaaacaactccacaatctccaaaatagcattcttgccattctggcgaggcacaaacaccccacacacacccgaagcaagcctgccattaccacccacagcaagccaatcatccaacacctgctgctgccacggatcaggcgtcaacccatacgcacgacccaactccccagcatcacccccagcagacaccgaatacgccgcagccacacggtgacgaggaacctgagaacccacaacctgagacatcaagcacccctacgcttcctataccggtcaatcatcgccaccgcagaacccccaccacggccaccagacaccacatcaaccgaataacgatccaacatgcccataaacgccttcacatgagcacgaagcgaagccaccaaatccgcgcgaccctcacgccacacacaatcatgaatcaccgcagcatccatgagaaacaaccactcctcatcagacacgtactgcgcgcgactatcctcaccccacacacgccaccaacgacgcgtctccccacaccaatcacgactatcaggaagctcaggctgcacaacactcaccaccaacacaaaaagtcgacaaacagacaaaaccacaaaagggaggtatttcactagatccgaacacc

SEQ ID NO: 2 - DNA, 30056 bp, Propionibacterium acnes bacteriophage
cccgcgtgtttcgccgtgccgccaggattgcccagtcgggtgagtctgcggatttcgcccaggttgaggtgatgttttctatgttggaggctgccgccccagaggatgctgtggaggccttggaggggcttcctatggttcgtgtggcggaggttttccgtgagtggatggaatataagcctgacggtaagggtgcctcgctgggggaatagtttggctccacggcctgattgatgattatcgtggggccatcgaatacgatttccgcaccaagtttggtgtttctgtttatagtgttggtggcccgcagatgtgttggggtgaggctgtccggctggctggcgtgttgtgtaccgatacgtctagccagttggcggcccacctgaatggttggcagcgcccgtttgagtggtgtgagtgggctgtgttggacatgttggatcattacaggtctgctaatagtgaggggcagccggagcctgtggcgaggccgacggatgagcgtagggcccggtttacgtctgggcaggtggacgatattttggcgcgtgttcgtgctggtggcggggtgtctcgcgagattgatattatggggtgaatagtgtatgtctggtgagattgcttctgcgtatgtgtcgttgtatacgaagatgcctggccttaaaagtgatgttggtaaacagttgtcgggtgttatgcctgcggagggtcagcgttcgggtagcttgtttgctagcgggatgaagttggcgcttggtggtgcggcgatgatgggcgctatcaatgttgctaagaagggcctcaagtctatctatgatgtgactattggtggcggtattgctagggctatggctattgatgaggctcaggctaagttgactggtttgggtcatacgtcgtctgatacgtcttcgattatgaattcggctattgaggctgtgactggtacgtcgtatgcgttgggggatgcggcgtctacggctgcggcgttgtctgcttcgggtgtgaagtctggcgggcagatgacggatgtgttgaagactgtcgcggatgtgtcttatatttctggtaagtcgtttcaggatacgggcgctatttttacgtctgtgatggctcgcggtaagttgcagggcgatgacatgttgcagcttacgatggcgggtgttcctgtgctgtctttgcttgccaggcagactggtaaaacgtctgctgaggtgtcgcagatggtgtcgaaggggcagattgattttaacacgtttgcggctgcgatgaagcttggtatgggtggtgctgcgcaggcgtctggtaagacgtttgagggcgctatgaagaatgttaagagcgccctgggttatttgggtgctacggctatggccccgtttttgaacggcctgcggcagatttttgttgcgttgaatccggttatcaagtctatcacggagtctgtgaagcccctgtttgcgtcggtggatcaggggattcagcgtatgatgccgtctattttggcgtggattaaccgtatgccggctatgatcacaagaatgaatgcacagatgcgcgccaaggcggagcagttgaagggcatttttgcgagactgcatttgcctgtccctaaagtgaatttgggtgccatgtttgctggcggcacagcggtgtttggtattgttgctgcgggtgtggggaagcttgtcgcagggtttgccccgttggcggtgtcgttgaagaatctgttgccgtcgtttggtgctttgaggggtgccgccggggggcttggcggcgtgtttcgcgccttgggtggccctgttggtattgtgatcgggctgtttgctgccatgtttgctacgaacgcccagttccgtgccgctgttatgcagctggtgggggttgttggccgggctttggggcagattatggtcgccttgcagccactgttcgggattgttgctggcgtggttgccaggttggctcccgtttttggccagattattggtatggttgctggtttggctgcccggctggtgcctgttattggtatgcttattgcccggctggttcctgttatcacccagattattggtatggtaacccaggttgctgccatgttgttgcctatgctgatgccggttattcaggctgttgttgctgtgatacggcaggttattggtgtgatcatgcagttgatacctgttttgatgccggttgtgcagcagattttgggtgctgtcatgtctgttttgccgccgattgttggtttgatacggtcgctgataccggtgatcatgtcgattatgcgtgtggtggtgcaggttgttggtgccgtgttgcaggtggtggcccgtattattccggttgttatgccgatttatgtttcggtgattggattcattgccaagatttatgctgcggttatcgtttttgaggctaaggttattggcgctattcttcgtactattacgtggattgtgaatcattcagtgtctggcgtgaggtctatgggcacggccatccagaatggctggaatcatatcaaatcgtttacgtcggcgtttattaacggtttcaagtcgatcatttctgccggtgttgccgcggttgtggggttttttacacggcttggtttgtcggttgcctcccatgtgaggtctggttttaacgcggctcgtggtgctgtttcggctgcgatgggtgctattcggggtgttgtgtcttcggtggtgtctgctgttggcgggtttttcgggtcgatggcttctcgggttcgtggtgcagcctctagcgggtttaacgcggctcgtggtgcggcttcttctgcgatgcatgctatggggtccgcggtgtctagtggtgtgcatagtgtgctggggtttttccggaatttgcctggcaatattaggggcgccttgggtagtatggggtccctgttggtgtctgctggtcgtgatgtggtggccggtttgggtaacggtattaagaatgctttgagtggcctgttggatacggtgcgtaatatgggttctcaggttgcgaacgcggctaagtctgtgttgggtattcattccccgtctcgggtgtttcgtgacgaggttggccgtcaggttgttgccggtttggctgagggtattactggtaatgcgggtttggcgttggatgcgatgtctggtgtggctggccgtcttcctgatgcggttgatgcccggtttggtgtgcgatcatcggtgggctcgtttaccccgtacgaccggtatcggcgtgcgaacgagaagagtgttgtggtgaatgttaacggaccgacgtatggtgatccgaacgagtttgcgaagcggattgagcgtcagcagcgtgacgctttgaacgctttggcttacgtgtgattgggggtgtggttcatgtttcttcctgacccgtctgatcgttctggtttgactgttacctggtctatggatccgctgtttggcgacgagcgtgtgcttcatttgacggattatacggggtcgtctccgataatgttgttgaatgattcgttgcgcggtttgggtgttcctgaggtggagcatttttctcaaactcatgttggggtgcacggctcggagtggcgcgggtttaatgtgaagcctcgcgaggtgactttgcctgtcctggtgtcgggtgttggcccggatcctgtgggcgggtttcgtgacggttttttgaaagcctatgacgagttgtggtcggcgtttcctcccggggaggagggggagttgtcggtgaagactcctgccggccgtgagcgtgtgctaaaatgccggtttgattcggctgatgacacgtttacggtggatccggtgaacaggggttatgcgcgttatctgttgcatttgacggcttatgacccgttttggtatggggatgagcagaagtttcgtttcagtaatgcgaagttgcaggattggttgggtggcggccctgtcggcaaggatgacacggcgtttcctgtggtgttgatgcctggtgttggttcgggttgggataacctgtctaataagggtgatgtgcctgcgtggcctgtgattcgtgttgaggggcctttggagtcgtggtctgtgcagattgatggtttgcgtgtgtcttcggattggccggtggaggagtttgattggatcactattgatacggatcctcgtaagcagtctgcgctactggatgggtttgaggatgtgatggatcgtttgacagagtgggagtttgcgtctattcctccgggtggttcgaagagtgtgaatattgagatggttggtttgggtgccattgttgtgtcggtgcagtacaggtttttgagggcttggtgaatggttgatggctggtcttgttccgcatgtaacattgtttacgccggattatcgccgtgtggcccctatcaatttttttgagtcgttgaaactgtcgttgaagtggaatggtttgtccactttggagttggtggtgtctggtgatcattctaggcttgacgggttgacgaagccgggtgcacggctggttgttgattatggtggtggccagattttttctgggcctgtgcgtaaggttcatggtgtgggtccgtggcgttcttcccgtgtgactatcacgtgtgaggatgatattcgcctgttgtggcgtatgttgatgtggcctgtgaattatcgtcccggtttggtgggtatggagtggcgtgccgacagggattatgcccactattctggtgcggctgagtcggtggctaagcaggtgttgggggataatgcttggcgttttccgcctggtttgtttatgaacgatgatgagagtcgtggccgttttattaaggattttcaggcccggtttcacttgtttgcggataagttgttgccggtgttgtcgtgggctcggatgactgtcacggtgaaccagtttgagaatgcgaagtttgatcagcgtggtttgctgtttgattgtgtgcctgcggtgacgcgtaagcatgtgttgactgccgagtctggttcgattgtgtcgtgggagtatgtgcgtgacgcccctaaggctacttcggtggtggttggtggccgcggcgagggtaaggatcggctgttttgtgaggatgttgattcggcggccgaggatgactggtttgatcgtgtcgaggtgtttaaggatgcccgtaacacggattctgagaaggtgtctcttttcgatgaggctgagcaggtgttgtccgagtcgggggccacgtcggggtttaagatcgagttggctgagtctgatgtgttgcggtttgggcctggccgcctgatgccgggtgatcttatctatgtggatgtgggttcggggcctatcgcggagattgttcggcagattgatgtggagtgtgattcgcctggtgacgggtggacgaaagtgactccgattgctggggattatgaggataatccgtcggctctgttggctcgccgtgtggctggtttggctgcgggtgtgcgggatttgcaaaagttctagaaaagaattgggggtttgttgtgggtattgtgtgtaaagggtttgatggtgtgttgaccgagtatgattgggctcaaatgtctggtctgatgggtaatatgccgtccgtgaaaggcccggatgattttcgtgtcggcactacgattcagggttccacggtgttgtgtgaggttttaccggggcaggcttgggctcacggggtgatgtgcacttctagtagtgttgagacggtgacaggcgcgctgcctggtcctggggagacccgctacgactatgttgtcctgtctcgggattgggagcagaatacggctaagttggagattgttcctggggggcgtgcggagcgcgcccgtgacgtgttgcgtgcggagcctggcgtgtaccatcaacagttgctggctactttggtggtgtcgtctaacggattgcagcagcagctggataggcgtgctatagctgcccgtgtggcgtttggggagtctgctgcgtgtgacccgacccctgtggagggtgaccgtgtgatggttccttctggggctgtgtgggctaaccatgctaacgagtggatgctcctgtctcccaggattgagacgggttcgaagtcgatcacgtttggcgggtctgctgtgtatgcttacacgatcccgtttgcccggcagtttagtagcccgcctatcgtggtggcgtctatggctacggcggctgggggcacgacacagattgatgtgaaagcctacaatgtgactgccaaggattttagtttggcgtttattacgaatgatggttctaagccgaatggtgttcctgcggcggctaattggattgctgtcggcgtgtaatgtacggcttgcgtgcatgtggcgtgttgtggtggttgtagtggtagggggctgtagtgtcatggtttacacctacacttgtggcctctctttgtaccgctatcgctactgttcttggttcgattcaggcggctacgtacaggtcgaagaagaggcttaggcagttgtctgcgcaggttgatgcgatggaagagtatacgtggaatattcgccatattgttcaccgctataacgcgaatttgccggagaatgttgagccagtgaagatgcctgatttgcccgagtttttgaaggatactgttgatggtggtggggggtgaattgtgagggagttggaggaggagaagcggcagcgccgctcgtttgagaaggcttccctgatactgttgttcctgtcgcttgtgctgttggaggtggttgctgggggtgctttacgtttcggtgctgtatcctctgagcgggattcggagcaggctaaagcccagtctaatggtacagccgccaggggtttagccagccgtgtgaagcaggtgtgtgcgcagggtgggcaggagtctgtgcggcttcaccagtctggtttgtgtgtggatgctcagcgtgttgagcggagtgtgcagggtgttccgggtccggctggtgtgcggggcccgcaagggcccgctggtgttgatggtcgggatggtagcaatggttctgctgggctggttggccctgttgggcctcagggttccccgggtttgaatggtgtgacgggtcctgacgggctgcccggcgtgaacggcaaggatggtgtttcgggccgtgcaggcgtggacggtgtgaatggatctgatggcaaggatggtcgtgatggttcggctggtgagcgcggcgatgtgggcccttctggtcctgccggaccccctggcgcgcagggtgagcgtggccccgccggtgtgaatggatctgatggcaaggatggtcgtgatggttcggctggcagtgatgggcgttcggtgatatcggtgtactgttccgggggccgcctggttgtgaaatatagtgacggtacggcctccaccgtgtcgggttctgcggcctgtgagagtgtgaaaccatcacctgtggttaccgtatcatcccacaaatagaatatgaagagggaagggtgttactagtgttgattgtggtgtttggtggtggtgtgtggtgagatacattccagcggcgcatcactcggccggttcgaatagtccggtgaaccgtgttgtgattcatgcgacatgcccggatgtggggtttccgtccgcttcgcgtaaggggcgggctgtgtctacggcgaactattttgcttccccatcgtctggtggttcggcgcattatgtgtgtgatgttggggagacggtgcagtgcctgtccgagtctacgattgggtggcatgccccgccgaatccgcattctttgggtatagagatttgcgctgatgggggttcgcacgcctcgttccgtgtgccaggccatgcttacacgagggagcagtggcttgatccgcaggtgtggcccgcggtggagcgtgccgctatcttgtgtcggcagttgtgtgacaagcatggtgttccgaaaaggaaactgtctgtggccgatttgaaggccggcaggcggggtgtttgcgggcatgtggatgtgacggatgcgtggcatcagtcggatcatgacgatccggggccgtggtttccgtgggacaggtttatggccgtagtcaacggcaaagatgagagtggggagttaacggtggctgatgtgaaagcgttacatgatcagattaagcaattgtcggcgcaggtggcccagtcggtgaataagctgcaccatgatgttggtgtggttcaggttcagaatggtgacctggcgcgccgtgtggaggctttgtcgtgggtgaagaatcctgtgacggggaagctgtggcgcacaaaagacgctttgtggagtgtctggtattacgttttggagtgtcgtagccgtattgacaggctcgagtctgctgtcaacgatttgaaaaagtgatggtggtttgttgtgggtaaacagttttggttgggcctgctggagcgggcgttaaagacttttgttcaaacgtttgttgctgtgttgggtgtgacggcgggtgtcacttatactgcggagtcgtttcggggtttgccgtgggagtctgccctgattacggccacggttgctgcggtgttgtcggtggctacctcgtttggtagcccgtcgtttgtggccggcaaacctaaaaccacggttgtggatgcgggtttggttccaccggatgatcctggaatagtggagcctcacatggttgatgtgtcggatcctggcatgatcgagcctgcagatgatgcggatcttggtgtaggctatgtgccgaaacacgctgccgagtcggaggttggcacggtagagtctactgttgcataagtgaatatagatgtgtgccccagcggtgctgccacgattgtgtggtggttgccgctggggcactatttttgtatattgcggtgtggctatgattcgttgctgtcgatggtgtcttcgagcatctggtacaggtggaggcaggtggagatcgtttcgctggcctggtctagaacgttccggccgataacgtttttgtggttgtcgcggtggcggatgatagcccacatgatctcgtcggctgccgcctgtaatagttttgcctggtatgcgattccggcgagccagtctagtgcttcctggcttgcataggggctttggtcctcgctgttgccgcgggtgttgctgttgcttgtggggtgtcctgcactgtcgcatagccacaggatttcgctgcattcgtctagcgtgtcctggtcgatagcgagatcgtcgaggctgacgtcgttgacggtaaggttcacgttgtcgagggagatgggtacaccgtactggttttcgacactgtcaacaatgttttccagctgttgcatgttggtgggctgttgttggacgatacggtgtatcgctgtgttgagggtggtgtaggtgatgttgtgtgtgttatccatggtttttatgccattccttcgttatcgtctggcatgtagtatgtgctgtttgcgtactcggtgagggtgatgagtgtttggtctgcccactgtttcacagtctgccttgtcaccccgagtcgttgggcggccgacgcatatgtttggtcgtatccgtagacttcccggaatgctgccaacctagctaaatgttttcgctgttcggatggttcacaggcgagggtgtagtcgtcgatggctagctgtagatcgatcatggcgacaatgttgttgccgtgatgctggggggcggttggtgggggtggcattcccggctccacggagggtttccatgggccgccgttccagatccattgggcggcttgaatgatgtcggctgtggtgtaggttctgttcatgtgtcaccccctgaacaggtcgttggtgttgctggtgttggtggtgtcgaatcgtccgacgcagtggcagtagtcgtacatgagtttgataatgtgttggtggtctcccaaataggtgtttccgctgatgctgtaggtggctgtgccgtctttactgatggtgtatttggcggtgatggtttcggggttttcggtgtcggtgatgatggctgtggtggtggtgcctactgtttggagtatggtggtttgggttccgtcgtcgatggtggttttaaccattgggggttctcccctttcagttgctggtttggttgtcggctagatgaatgatgtcgggtaagggtttcggctggtctaaatgttgtgtggttttgttggctagccgtttggctaccctgtaacacattttggtgtagtgtttgttgtctaggttgtggtattgttcccgcaccgcaatatatagtagggagtcttggtacaggtcgtctgcactgattgcggggtagtgtgcggctgttttggtgcatgcccggttgagtgtgcgtagatggtggtttgtggcccacacccacgatgcggtggtggcttgctgcactttggttggtcgtctgctcatggcatctctttcatcgggctatctggtagttgtttggtgttttgttgttgatagtgtagcacacgagtccggggtttccggtagtgcccgtcttgtgccggtaccatgtggattcgccttccatggaggggcattggatgaaggtgcgttgtccttgttcggagatttctaggtggtgccggtgcccggccatgagaatatgggatgtggttccgttgtggaattcttggccgcgccaccaatcatagtgtttgccggtgcgccattggtgtccgtgggcgtgcaggatgatagccccggctacgtctacggtggtggtcatttcgtctcggctggggaaataaaagtgtaggttggggtattggttggtgagctggtaggcttctgcgatggcgcggcagcagtccacgtcgaaggagtcgtcgtaggtggtgacgccttttccgaagcgcacggcttctccgtggttgcctgggatggatgtgacggtcacgtttttgcagtggtcgaattggtggatgagttgcatcatggccatgcgggtgagcctgatttgttccgtcaagggggtttgtgtgcgccaggcgttgttgccgccttgtgacacgtatccttcgatcatgtcgccgaggaatgcgatgtggactcgctcgggtttgcctgcctgttgccagtagtgttttgcgactatgagggtgcgtaggtagtcgtcggcgaagtgtgatgtttctccgccggggatgcctttgccgatttggaagtctcctgccccgatgacgaaggctgcggtgctgtagtcggtgtgggtgtcttgttcgggttttgggggtgtccattcggctatcttgtcgacgagttcgtctacaggataggggttggttgcgggttggtggtcgatgattttttgtatggatcggccggtttctccgttcggtaaggtccattcggagatgcgtgtgcggcgtacggtgccgttggctagattgtcgtcgatggtgtcgatggcgttgtcgtggttggctagctgtgtgagtagccggtctatgttgtctatcatcgggtatcctcttcttgctgtgtggtgttggcttgtttgcggcggtagtctttaatgacggtggcggagatggggtatccggcttgggtgagttgttttgctagccatgaggcggggatagacctgtcggcgagcacgtcggcggctttgcggccgtagcgttggatgagggtttcagttttggttgccatggtgtcctatcggttgtgtggtgggttgccatcctgtgcggcagtcgccgtcgtgtcctggtttgcgtgtgcaccacgatgttgttccgtctgtgtggttgagtgtttttccgcacatgacgttgtggagatgctccggcaactggtcggtgttattgctggtttgtgtgtcgaagagtgttttctggttggtgaaatgctctgacacggtgccgttgtgtacgggtagtatccatgttttccattgttgttgcatccgggtgttccagtggaattgtttggccgcgttttctgcctgttttaaggttttgtagtagcctacaatgattcgctggtgttcactgtcgggttggttttggcctcgccagtattgtgccgcgacggcgtagcggttgttgtcggtgaagcgctcccagcagtattcaataatgtgttgcagtactgtgtcgggtatgtcttgtgcttggttttcgttaagccattcttcgacaatgatgttgcgtatggcgtgtttgtctttgatggtgggtttgaacgagatactcacgatagcaccggctggtcgtcttgcatgaactggttgaaggtgttgttcccggcgtgttgggcttgtgtgatttgctggtcggtccagtcggggtgttgctgtttcaaatagtaccagtggcacgcattgtaggtttcgtcttgtagccgggtgagatggttttcggtgatgatttgtttccacattgtccatgacacgtcgagccggttgaggatttcgagggctgggatgttgaattggttgaggaagagtatttcgtgggtgtagtattccttctcgtaggagtcccatccgcttcggtgcctgttgggctggtttttggggtaggcttcccggcatactttgtgcaaatgtttggccatgtcgtcgggtagtttaatgtcggggttggcgcggatcatggatcgcatcccatcataggtggtgccccaggtgtgcatgatgtaggtggggtcttcaccatcagcccatttttctgcacagatggcgaggcggatacgcctcctggcggcttggctggtgttgcgccggttggggatggggcacgtgtcgaggggatccatgatgttttagtgtacctttcttggtttgggttgcttgtgtggttttactgtagcacagtgtctagtgcttgtgtcaaccctgtttttccggcctgcaggtaggtgtctgtgacatccccgaccgtgaggggcacatgggtggcttgcgggagcgcggtttggatggtttgtgccatctggtctcccgccttgtctgggtctgaccagatgtagatgtggtcgtagccttcgaagaatttggtccaaaaggtttgccacgaggttgcgccgggtagggctacggccgaccatccgcattgttcgaggatcatggagtcgaattcgccttcgcaaatgtgtatttcggctgccgggttggccatggcggccatgttgtagatggagcctgtgtcccctgccggggtcaaatatttggggtggttgtgggttttgcaatcatgggggagtgagcagcggaaacgcatttttcgtatttcggctggcccttcccagacggggtacatgtaggggatggtgatgcactggttgtagtcttcgtggcctggtatggggtcattgtcgatgtatccaaggtggtggtagcgggctgtttcttcgctgatgcctcttgccgagagaaggtcgagtatgttttcgaggtgggtttcgtagcgggccgaggctttctggattcggcggcgttccgcaatgttgtatgggcgtatactgtcgtacattcgggttttcttcctctaattgttgtttcagtttgtggagtcctcctccgataccgcatgtgtggcagtaccagactcccttgtcgaggttgatgctcatggagggctggtggtcgtcgtggaacgggcagaggatgtgttgctcgttccgtgacggattgtagcgtatctggtaggtgtcgaggaggcggcaggtgtcagaggtgtgggaggagctcgttgagggttgataccacataggcttcgctccagggtttgttgcgctgtttcatgatgacgagtccgatggtggactggttttctcggtttcggtgtgtttcgtagttgcgtgcctcccggctggcttgtttcacgaattcggcgaggtgtgcctgtcctgctttcgcctcgataatgtaggttttgttgccggttgtgaggatgaggtcgccttcgtcctctttaccgttgaggtggaggcgttcgatattgtgtccgatgtggcgtagctggtggaggagtcttgtttcccattctgcgccggccctgcggttgcgtgcctgctgtgtagccatcatagtcctttatgttcttgtgtcatgttccatggctgtttttcgaccaggggtccgaagaatgtgtattccgggtaggcgcgtagtcgctcatattttgttccgtctgggctggatttgccggttctctgtttcagtacggcgatgcgagcctctgccggtatcgataggccgttgccgttgtcttcgccgccatacagggagactcccaatatgagttgtggtttttcggagaggccgtttttgatttcccgcctagccggggggtgttcgatgtcggtgccggttttgtcggttgcgtggtgtgtgacaataatggtggagccagtatccctacctaatgctgtgatccattgcatggcttcttgctgtgcctggtagtcggattcgcagtcttggatgtccatcaggttgtcgatgacgatgagtggtgggaaggtgttccacatttccatgtaggcttgtagctccatggtgatgtcggtccaggtgatgggtgactggaatgagaaggtgatgtgtccgccgtggtggatgctgtctcgatagtattctggcccgtagtcgtcgatgttgtgttgtatctgtgtggtggtgtgttgggtgttgagtgagatgattcgtgtggaggcctcccagggtgtcatgtcccctgatatgtagagggctggctggttgagcatcgcggtgatgaacatggctagccctgatttttggctgccggaccgccccgcaatcatgaccaaatcccctttgtggatgtgcatgtccaggttgtcatacaagggtgctagttggggtatgcggggcagttcggcggcggtttgggaggctctctcgaaggatctttggagagagagcatcgggaccttaatctatctgttggatgttgttttggtggtcagatggagtcgatgtcgatgtcagcatcggcaggggctgtggtgtcgtctagctggccggtgtcgcgcttgtctacgtattcggcaaccttatcgtagatggcgtcatcaaggggtttgagaacgaccgcgttgaagccgtttttagtgcgaacggtggcgagtttgaaggcctgctcttcgccaaggtaggcttcgaggtcgcggatcatggagtgtgggcggtcgttgttgccgcgcgctttctcgataatggcgttggggatggtttcgggggtgccgttgttgagatcctggagggtgtggaagatggtgacatcggcgtaaatgcgatcggcggtctgtccaccgtagccttcagtgttgtgctggacgtcgtgcactttgaaggcgatggcggtggcgtcctggtttcgggacgggttgaagaaggtgctgttgctgttgttgcggtagttggcgagtcccattgttgtttcctttactatttttgttggtttgtttgtcggtttttatcgggtgaggctgtttcgtttgctgcggaaagcctcagacacgtcagggttgctggtgatggtctttttgtattgtttgagtaggtctgctagttgtgtcttgctggtggctttgttgattttgttgatgatgatgtcgttttcctggttggcgattttgttgacgtagtctttggcggctttatcgtatcggtcttggagcaggattgctgcgctggctatgagtgttgcgaggtcccagtctttggatacggtttcgtctttcaatcctcccaataaatcgataatggattgtttgatgtcttctgcggtgtctcctcggatgactgtccatggggcggcgtagtcgccaccgtatttgagtgtgatagttagttttccgttgtctgtggtgtgctcgtcggtcacgtgttttccttttctttactgtcggtttctggtggctgtacggtggtttctatcgggtatctgtaggcgtttttcccgttgacggcccagcaggcgtcccggacggggcatcctttgcagagtgtggtgacgtgtgggacgaagatgccttggctgattcctttcattgcttgactgtacatggatgatacatgccggtaggtgttgttgtcaagatcaatgagttcggttgctgtgccctgctcgactgattgctcgtctcccttggtggtggcgggtgtccaaaacatgcctttcgtcacatcgttgccgtgttggttgagcatgtaccggtatgtgtgcagctgcatgctgtcggcgggtaggcgtccggttttgaggtcgaggaggaatgtttcgccggtgttggtgtcggtgaatacccggtcgatgtagccaacaatctgggtgccgtcttggagggtggtttctacagggtattcgatgcctggccggccgtcaataacagcggtgatgtattgtgggtggttgcgcctccatgttttccacctgtccacaaaggtggggccgtatatcatccaccaattgtagtcttttttgtgtggcccacccgactcgcacatgtttttgcacactcggccggagggtttgatgtttgtgccttcggattcggcgagggcgatttgggtgtcgaaaatgtttttgaaggatgagagtttgtctggcagtgcagggtattcgtcggggttgtacaggtgtaggtcgtattgttcggtgatgtggtgtatggcgcttccggcgatggtggcgtaccaggtgtggtgttgggtgtggtagccgtgggataggcgccatttttcgccgcattcggcccactgggtgagtgaactgtaggagatgtggcctgggtggtggatggttttcgggtattgtgctaggggcattacttgtcgcctttgtgggtgttccatgggttgcgggtgtcttggccggcattgtgttgctggtaggcgaggagtgcgaggcagtgccaggcagcgtgtgccaggtggggtagcccggattcatcatcgaggttgtttccttgctgccatgatagcaggtgcctgtagagggcgtcgacactgtggctccacgggtagccgccggtccagttgttgtcgccgtatttggtggctccgtatcctgccacggagccgagggcgtggagggctgtggggtcgatgagggatagcctgcaaagtttgagttctttcttggcgccagtatcagggtcggtgtacatgctggttagctcatccatggtgtgtgtgctccttacgtgtggggttactggttggggttgtgggcgagtgtgacggcgaggatgatgatggcgagggtttctgcgatgaggatgggtgttgtgatcatttggggtcgcggggattgttggtgagtgtggatgcgcctaggagggtggtgagtgtggatgcggcgatgatggcgagggctgccttgtgtggggtgccggtggcgtacatccatgtgatgatgccgccttggatccatgccagtgtggtgaagaacgtttcgtagctgtgcaactcgatactgttgggtgtgttcatgcttgctcctgaagaatggtgttgatggttttgtaaatgttgtacaggtctgtttcgatggtttgtagctgtttgatttcgtggtcgagattgatgtccggattgagggtgttgatgcgggatgcgatgtcggtggctgtgcgtagtgtgccgccggtgtggtgaatgatgtgtgctgtgtcggcgagtccggtggtgacagcgtagtgggagaggatgggcatggctgtccttgacggggttactgttgcgggttgatgttgaggtcggtgacgttggggtgttcttctgttccggtgacgaggcagtggacagtgactgggagtttggatgctcccggctggcggacggtggcgccgtagacgatgctgaatgtgtctttgccaataattttgtggagttggaggtcgatgtcggggttgccgttccagttgacaccgtgtgcggctgcctgttgttctgctttgcggttgcaggtgtgtgccgcggtgatcatggtgagaccctgtgaggtttcttcaccccgtgtttgggcttgccggtgggctttggcctgctcggcgtgtagggagcggactgcggcggcctgccgggctttcttctcggctttgcgctgttgaacggtttcaggtgtccattcggtgttggctgtggtggcttgtggggctggctgtgaggcgagtggcgggttgtcgtctggggctggcatgaaggatgctgcggcgatgatggcggctgtgattccggcgatggtgtagcctgttttcttgttcatggctttgtgttcccctttccggggtgttgttcgttgctgacatgattaatactttcagcgtctgggcccactgtcaaggctgcgctcaaatgttgtgagcgatacttgtgtggctaggggttttgtcatgtaagcgtgacatgtcactaccttgcgtccagtatccatggcggttgcgggccatccctttggcgagcatctcgtccacagtgaggcacctgcggcgattggggccttccttgactccatgctgccctactctgtgcatgtccccggcgtaagtgccattaaatgtttcgtggcagattgtgcagtgttctggtcggtatccgatgattgtgctatcgcacttgtggcatgtccattgcatgattggtccttctttcgtgttttaagctattgcatttagcgtacaagagactttcagcgctcttgggtaggattatataggtcgggtatttctaggcgattctaggctcattgtgtgtggctgggggttatcgggcgaacagggtgagcaggtggcccacattgatgcgggtcacattccagtagagttgcgtggcctcatccgcggtgagtggtttccactcgtcatggctgaacacggtgccatcggatgcgatgaacgtgttggggcgtagcttgtgaagctcggtctctacatgctgccggtaggtttcggcgaggccctcaaaatccatgtggtcgcaggagaggttttcgaggagtgtcaggtcgaagggtgtggggcagtcgtagctggcggggctgtagagctgggtgaagtggttggcgatcttctgcatgacgggttccttttctcgtgtgttgggttgatggttttatcgggtggatgcgacaaggatggcgtccacatcgatcatgtcgatgagatcgtggagttcctcggcctcattctcggagaggtggcgccagccgggtggcccatacactgcgccgtcgagggtgacagtccacaggggccggatgagtcgtatggcttcttgtactttggcgtggtacatgcggcgcaccatatccagatcaatgtcgtctgaatggtttccggtgaggctgtggaggctgagcgggtctatttctgtctgcctgtagaggctggtgaaggatggtgtgatgagtgtgccatccatgagggtgtgctcctttcaatggttatgggggttgttgtggtttctagagtgtggaggttgcgatcctatagtcaaggctacgctcatttggattgagcgtttcgtatgggtgtggcatggaatctacaccctcctactgtgtgagatgtatcacatccttctggcttggtgtacactcccgaggccactctgccgatctggcgtggagggtatagcccagaaataccgtttaaagcttcaggggtacgcctaggagcgccttgcagggtgggggctaggtatttataccccgaagcaattctgatcgattctagacgcctcccagagcccgatacgcgatcagccatctcggcatagatcatcagcccctatcctagttagctaagcctcaactatgtggacaatgtgggatgctaagggggaagaaggacacggtaaaagaaagaggggggagcatcagccttcaagccttaaggtcttagcagttagcaccgagccccctcaagggctcagcatcagcctcatcgggctcagctcatcaggcacagccctgaaaagggtacacgccatcagggaaggcttgagagtacgaggagccctagcgacgagtactcgaaagcctgagggaacaccctcagcactgatgggcctagcgtattcggaaaggacacaagagtcaagtgtgacagctgtccgggagtgaaacccgttccgactaggggtttcagcctgaaccaccctcaaaggttacaagactctaagaaaatttaaggaaaagtttaggtttaatttttggacctttactaccaaaaacacccatttacacccctcaaacccgcctatagagccaaaaccaccagtttgactcatcccaggtggggtatgctaggctggacaggtagccagctggacgcgaggccagaaagtgctgacgcacttcccgacctcgcttaccatcagtctaccaaacactttaaagcttcaaggcttagcgctaagcccttaagaccttaacgcttagcaccgagccccctcaagggctcggcatcagccttaaacactttaagtaactttaaaaccttaaaaacttaaagactaagcgctaagaccttaaggcttaacacctaaggtaatatataaatcttaacacttaaagttaataaataaccttaacagcttagcacttaagataacatataaaccttaagagctaagttaacctttaaggcttaaacacttaaagcattaagagcttataagtctttaaggatctaagttactataaaagctttaaagtcttaaagtaaatatataaccttaacagttaaacgttaaaagctttaaaccttaacacctaagttaagtataaaaccttaaaggcttagcacttaaggatataaacttaacatcagtgtttaagacttaaagagttaaagtaattattaagacttaaaggcttataagctttaaacacttaaagtaactataagactttaaaaaccttaaatacttaaagttaaccatcagtcttaagctttaatattataacctataagtcttaaagcttataggtataataatataatataagtattaaagcttataagttataaaagttttagaagagttaaggggttaacttctttacttctcttctctctttggttctttctctcttctcttcttttcttcatcaggggagaagaggaacctttaacgtcaacgctgatggtcttttcgccgtgtgtctcgtgtgcttctggtcgcaagctcccatcgcacactccccacactctttcacccgtgtcccctttcaggcttagcgtgttcggctgaaggcgtacggcgtgtcacgcttaaacccttaacaccaggtaagacttaaagtacatattataagtagaagactttaaaacctttaaggtgttcccgcttagcccgtgttcctttaacgctaggcgctcagcgctaagctgtgaaacgtgaacacccatccacccccatttttctttcgtgtccttctctttttgacacagctggggggcgatgtgatatttctcacatgccagggggtgtgggtgaaaaacaaccaccccggcacaaacagaacaccccgccaaacgaacaaaacagggcctaggatcgaacagcagggcaagggtagagtattcctacccccagacgactccaggctgttacaggagcaatgagaggctcgcaggggtcataggtgatcgggggacgcgatggcacacaccaaccgcaccgcatcatcagcccaccggcgctggcgggcaagactcatcacccaagcccaacaacaaggccaaaccgaatgcccactctgcggagcccagatagcctgggacacacacgatctgccaaccagccccgaagccgaccacatcacacccgtcagccggggaggactcaacaccctcgacaatgggcaaatcatctgcagaacatgcaacagaagcaaaggtaatcgcagcgaaccaaacattagtttccaacaacaaaccacaaaaaccttgatcccatggtgaaaaaacccacaaaccccacgggaaccaccccctgcacacccgtgcaaaaccacgtacggcttagtgaaatacctcccttttgtggatttgtctgtttgtcgactttttgtgttggtggtgagtgttgtgcagcctgagcttcctgatagtcgtgattggtgtggggagacgcgtcgttggtggcgtgtgtggggtgaggatagccgtgcatcgtacgtgtctgatgaggagtggctgtttctcatggatgctgcggtgattcatgattgtgtgtggcgtgagggtcgggcggaccttgtggcttctttgcgtgctcatgtgaaggcttttatgggtatgttggatcggtattcggttgatgtggcgtctggtggccgtggtgggggttctgcggtggcgatgattgaccggtataggaagcgtaggggtgcttgatgtctcaggttgtgggttctcaggtgcctcgtcaccgggtggctgcggcgtattcggtgtctgctgggggtgatgctggggagttgggtcgtgcgtatgggttgacgcctgatccgtggcagcagcaggtgttggatgattggcttgctgtcggtggcaatggcaggcttgcttcgggtgtgtgtggggtgtttgtgcctcgccagaatggcaagaatgctattttggagattgtggagttgtttaaggcgattattcagggtcgccgtattttgcatacggctcacgagttgaagtcggctcgtaaggcgtttatgcggttgaggtcgttttttgagaatgagcggcagtttcctgacttgtatcgtatggtgaagtcgattcgtgcgacgaatggtcaggaggctattgtgttgcatcatccggattgtgccacgtttgagcgtaagtgtggttgtccgggttggggttcggttgagtttgtggcccgtagccggggttctgctcgcgggtttacggttgatgatttggtgtgtgatgaggctcaggagttgtcggatgagcagttggaggctttgcttcctacggtgagtgctgccccgtctggtgatccgcagcagattttccttggtacgccgcctggcccgttggctgatggttctgtggtgttgcgtttgcgtgggcaggctttgtcgggtggtaaaaggtttgcgtggacggagttttcgattcctgacgagtctgatccggatgatgtgtcgcggcagtggcggaagttggcgggggatacgaatccggcgttggggcgtcgcctgaattttgggactgtaagcgatgagcatgagtcgatgtctgctgccgggtttgctcgggagcggcttggctggtgggatcgtggccagtctgctacgtcggtgattccggcggataagtgggctcagtctgcggtggatgaggcgagtctggttggcgggaaagtgtttggtgtctcgttttctcgttctggggatcgggttgctttggcgggtgctggccggactgatgctggggttcatgttgaggttattgatgggctgtcggggacgattgttgatggtgtgggccggttggctgactggttggcggttcgttggggtgatactgaccggattatggttgccgggtctggtgcggtgttgttgcagaaggcgttgacggatcgtggtgttccgggccgtggcgtggtggttgctgatactggcacttatgtggaggcttgtcaggcgtttttggagggtgtcaggtcgggtgtgatcagtcatcctcgtgctgattctcgccgtgacatgttggatattgctgtgaggtcggctgtgcagaagcgtaaggggtctgcgtggggttggggttcctcgtttaaggatggttctgaggttcctttggaggctgtgtctttggcgtttttgggggctaaacgtgttcgtcgtggccgtcgggagcgtagtggtaggaagcgggtgtctgtggtatgaactcggatgagttggctctgattgagggcatgtacgatcgtatccaaaggttgtcttcgtggcattgtcgcattgagggctactatgagggctcgagccgggtgcgtgatttgggggttgctattcctccggagttgcagcgggtgcaaacggtggtgtcgtggcctggtatagctgtggatgctttggaggagcgtctggattggcttggctggactaatggtgacggctacggcctggatggtgtgtatgctgcgaatcggcttgctacggcgtcgtgtgatgtgcatttggatgcgctgatttttgggttgtcgtttgttgcgatcattcctcatggtgatggtacggtgtcggttcgtccgcagtcaccaaagaattgtacgggcaagttttcggctgacgggtctcgtctggatgctggccttgtggtgcagcagacgtgtgatcctgaggttgttgaggcggagttgttgctgcctgatgtgattgttcaggttgagcggcgtgggtctcgtgaatgggttgagacgggccgtatcgtgaatagtcttggtgcggttccgttggtgcctgttgtgaatcgtcgccgtacttctaggattgatggccgttcggagattacgaggtctattagggcttacacggatgaggctgtgcgcacactgttggggcagtctgtgaatcgtgatttttatgcgtatcctcagcgttgggtgactggcgtgagcgcggatgagttttcgcagcctggctgggtcctgtctatggcttctgtgtgggctgtggataaggatgatgatggtgacactccgaatgtggggtcgtttcctgtcaatagtcctacaccgtattcggatcagatgcgcctgttggcgcagttgacggctggggaggctgcggttccggagcgctatttcgggtttatcacgtctaatccacctagtggggaggctttggctgccgaggaatctcggcttgtgaagcgtgctgagcggcgtcaaacgtcgtttggtcagggctggctgtcggttggttttttggctgccaaggcgttggattctcgtgttgatgaggccgatttttttggtgatgttggtttgcgttggcgtgatgcttcgacgcctacccgggcggctacggctgatgctgtgacgaagcttgtgggtgtcggtattttgcccgcggattctcggacggtgttggagatgctggggcttgatgatgtgcaggttgaggctgtgatgcggcatcgtgccgaatcttcggatccgttggctgcgcttgctgaggctatatcgcgtcaaactaacgaggtatgataggtgatggcttcgggggttgaggcgaggcttgctgccgccgagtatcagcggcaggcgattcgttttgccgggaaatacgctgggtattattctgagcttggtcgtttgtggcgtgccggcaggatgagtgacacgcagtatgtgcgtttgtgtgtggagttggagcgtgccggccatgatggttcggcatcgttggctgccaggtttgtgtcggattttcgccggttgaatggtgtggatcctggtttgatcgtgtatgacgagtttgatgctgctgcggctttggctaggtcgttttcgactatgaagattatgaatagtgacccggatagggcgaatgatactattgatgctatggcggcgggtgttaatcgggctgtcatgaatgctggccgtgacacggttgagtggtctgctggtgcgcagggtaggtcgtggcgcagggtgactgatggtgatccgtgcgcgttttgtgccatgttggctacgaggtcggattatacgaccaaagagcgggcgcttactactggtcatacgcggcgtcataagcgtggtggtaagcgtccgtttggttcgaagtatcatgatcattgtggttgtacggtggttgagattgttggcccttgggaaccgaatagggctgatgccgcatatcagaggacgtatgagaaggctcgtgagtgggttgatgatcatgggttgcagcagtcgcctggcaatattttgaaggctatgcgtactgttggtggcatgagataatttgatgtggtttccggttgtgcgccgccggttatcggtgcacggggttgtctcccgcacgggggtcaacaatgttgtgttgttttccgcaaggagtgtagggttaggctatggccgatcaaaaagttgaagagcagaatgttgacaatgatgttgtggagtccggaaaggataacggcattgttgatacagtaaaagacgatggcgggcaggaggtagccgacaatcagttgaagaatgaaggcgagggtaaatcgccggggactgattggaaggcggaggcccgtaagtgggagtctcgtgctaaaagtaatttcgccgagttggagaagcttcgtacatcgagtgacgattctggatctactattgatgagcttcgccgcaagaatgaggaactcgaagacaggatcaacgggtttgttcttgagggtgtgaagcgcgaggtggcttcagagtatggcttgtccagtgatgcgatcgctttcttgtcgggtggcgataaggagtcgcttgccgagtctgcgaaagctttgaagggtttgatcgaccatagtagtggtggcgcgggtgtgcgccgtcttgcggggagtgcccccgttgatgatgttaaacgacgtgagggtgtcgcgtttgtggatgctcttgtcaataattctaggagatgatttgtgatggctgacgattttctttctgcagggaagcttgagcttcctggttctatgattggtgcggttcgtgaccgtgctatcgattctggtgttttggcgaagctttcgccggagcagccgactattttcggccctgtgaagggcgccgttttcagtggtgttcctcgcgccaagattgttggtgagggtgaggttaagccttccgcgtctgttaatgtttcggcgtttactgcccagccgatcaaggttgtgactcagcagcgcgtgagcgacgagtttatgtgggctgacgctgattaccgtctgggtgtgcttcaggatctgatttcgccggctcttggtgcttcgattggtcgcgccgtggatctgattgctttccacggtattgatccagctacgggtaagcctgctgcggctgtgcatacttcgctggataagacgaagaatactgttgatgccaccgatagcgctacgaccgatcttgttaaggctgtcggtctgattgctggggccggtttgcaggttcctaacggtgttgctttggatccggcgttctcgtttgctttgtcgactgaggtgtatcctaagggttcgcctcttgctggccagcctatgtatcctgctgccgggtttgctggtttggataattggcgtgggctgaatgttggtgcttcttcgactgtttcgggtgccccggagatgtcgcctgcctctggtgttaaggctattgtgggtgatttctctcgtgttcattggggtttccagcgtaacttcccgatcgagttgatcgagtatggcgatccggatcagactgggcgtgacttgaagggccataatgaggttatggttcgtgccgaggctgtgctgtatgtggctatcgagtcgcttgattcgtttgctgttgtgaaggagaaggctgcaccggatcctaatccgccggccgagaactgattcatttgttgcgataatgtttatgctgtgtgcagggggtggtgttgatgggtatcattttgaagcctgaggatattgagcctttcgccgatattcctagagagaagcttgaggcgatgattgccgatgtggaggctgtggctgtcagtgtcgccccctgtatcgctaaaccggatttcaaatatagggatgccgctaaggcgattctgcgtagggctttgttgcgctggaatgatactggcgtgtcgggtcaggtgcagtatgagtctgcgggcccgtttgctcagactacacggtcgaatactcctacgaatttgttgtggccttctgagattgctgcgttgaagaagttgtgtgagggtgatggtggggctggtaaagcgttcactatcacccccactattaatagtagatatgcacattctgaggtgtgttccacggtgtggggtgagggttgctcgtgcgggtcgaatattaacggctacgctggccctttgtgggagatatgatatgaccagttttccttacggtgaaactgttgtgatgcttcaaccgactgttcgtgtcgatgatctgggcgacaaggtggaggattggtctaagcctgtcgaaaccgtgtaccataacgtggccatctattcttcgttgtcgcaggaggatgaggctgtcggccgtgactcggattatgagcattggtcgatgcttttcaagcagcctgttgtgggtgccggttatcgttgccggtggcgtatccggggtgttgtgtgggaggctgacgggtctcctatcgtgtggcatcaccccatgtccggttgggatgctggcacgcagatcaatgtgaagcacaagaaaggctgataggtagtggctcaggatgtgaatgtgaagctgaacttgccgggtattcgtgaggtgttgaagtcttctggggtgcagggcatgttggctgagcgtggcgagcgtgtcaagcgtgcggcctcggcgaatgtgggcggtaacgctttcgatagggcccaataccgtaatggtttgtcgtcggaggtgcaggttcaccgtgttgaggctgtggcgaggattggcaccacctataagggtgggaagcgtattgaggcgaagcatggcacgttggcgaggtcgattggggctgcgtcgtgatcgtttacggtgatccgcgtgtgtgggctaaacgtgtgctcaaggatgatggctggctgtctgatataccgtgtacagggacagtgccggatagttttgagggtgatctgatttggttggctcttgatggtggcccgcagttgcatgttcgtgagcgagtgtttttgcggatgaatgtgttttctgatatgccggatcgtgctatggcgctagccaggcgggttgaggccgtgctggcggatggtgtggatggtgacccggtggtgttttgtcgacggtctactggccctgatttgttggttgatggtgcacgttttgatgtgtattcgctgttcgagctgatatgtaggcctgtcgagtctgaataagcttattgtttttgttttaatgtaattgtttgatatttaatgggggttgtgatggctgcaacacgtaaagcgtctaatgttcgttccgctgttactggcgacgtttatattggtgacgcgcacgcgggtgattctattaagggtgtggaggcggttccttccgggcttaccgctttagggtatctgtcggatgacgggtttaagattaagcctgagcgtaaaacggatgatttgaaggcttggcagaatgcggatgttgttcgcactgtggctacggagtcgtctatcgagatttctttccagctgatcgagtctaagaaggaggttatcgaactgttttggcagtcgaaggttactgccggatccgattcgggttcgttcgatatttctcctggtgccacaacaggtgttcatgccttgttgatggatattgttgatggcgatcaggttattcgctactatttccctgaggttgagttgattgatcgtgacgagattaagggtaagaatggcgaagtgtacgggtatggtgtgacgttgaaggcttaccctgctcagattaataagactggtaatgcggtgtcgggtcgggggtggatgacggctttaaaagctgatactcctccgactcctccgccggccccggttcctccgaagcctcagccggatccgaatccgccgtccgataactgatacacgattttaggggattgttgatagatgagtgacacgggtttcacgttaaagattggtgaccgtagctgggtgttggcggatgcggaggaaacagcgcaggctgttcctgcccgcgtgtttcgccgtgccgccaggattgcccagtcgggtgagtctgcggatttcgcccaggttgaggtgatgttttctatgttggaggctgccgccccagaggatgctgtggaggccttggaggg

SEQ ID NO: 3 - DNA, 29695 bp, Propionibacterium acnes bacteriophage
gcataagagggttttagatttagtctttggttactggatttcattcgtgtgctcttccgttctggtcttgcacgggtgtgcagggggtgtccccggtgggggttggcgggtttttcaccatggaatcagcgtttttgtggtttgttgttggaatttgatgtttggttcgctgcgattgcctttgcttctgttgcatgttctgcagatgatttgcccgttgtcgagggtgttgagtcctccccggctgacgggtgtgatgtggtcggcttcggggctggttggcagctggtgtgtgccccaggctatctgggctccgcagagtgggcattcggtttggccttgctgtcgggcttgggtgatgagtcgttgccgccagcgccggtgggcttgactggctgtgcggttggtgtgtgccatcgcgtcccccgatctcccatggcccctgtgagcctctcattgcccctctaagggcttggaatcgtctgggggtatgaatactctaccggtgccctgccgatcgattctaggccctgttttgttcgtttgagggggtgtcttgaacgttccggggtggttgttttctccactaccccccatgggtgtgaaaaagatcacatcgccccccagctgtgtcaaaaagaaggacacgataaaaaagaagaggggtgggtgggtgttcgcgtttcacagcttaccgcttggcgcccagcgttgaaagacacaggctccgcaggaacaccttacaggtttttaaagtcttctacatataatatacactttaagtcttacctggtgttaagggtgttggcgtgacacgccgtacgccttcagccgaacacgctaagccgtaaagggacacgggtgttagagtgtggggagtgtgtcatcgggagcgtgcgaccggtggtacacgagacacacggtgaaaagtccatcagcgttgacggtaaaggttcctcttctcccctgatgaagaaaagaagagaagagagaaagaaccaaagagagaagagaagtaaagaagttaacctcttagctcttctaaaacttttataacttatattatattattatacttataagctttaagacttataggtataatattaaagtttaagactgatggttaactttaagtacttaaggtctttaaagtcttatagttacttaaagtattaaagcttataagcttttaagtattaatagttactttaagtttttaagtcttaaacactgatgtgaagtttatatccttaagtgcttagcctttaaggttttatacttaacttaggtgttaaggtttaaagctttaaacgtttaactgttaaggttttatatgtactttacgtgtttaaggctttaagactgatgccgagcccttgaggggctcggtgctaagcccttaggtctttaagtatttggtagactgatggtaagcgaggttggaaagtgcgttagcactttccggccttgcgtccagctggctacctgtccagcctatcataccccacctgggatgagtcaaactggtggttttggctctataggcgggtttgagggctgtaaacgggtgtttttggtagtaaaggtccaaaaattaaacctaaacttttccttaaattttcttagagtcttgtaacctttgagggtggttaaggctgaaacccctagccggaacgggtttcactcccggccagctgtcacacttcactcttgtgtcctttccgaacacgctagccccatcagtgctgaggatgttccctcaggctttcgagtactcgtcgctagggctcctcgtactctcaagccttccctgatggcgtgtacccttttcagggctgtgcctgttcgggctgatgccgagcccttgaggggctcggtgctaactgctaagaccatcggtgctaagcgctaagaccttaaggcttgaaggctgatgctccccctctttcttttaccgtgtccttcttcccccttagcatcccacactgtccacatagttgaggcttagctaaccaggataggggctgatgatctgcgtctggacctctgatcgtgtatcaggctcctgtaggcgtctagaagcgattagaattgcttgggggtataaatacctagcccccaccctgtaaggcgctcctaggcgccgtgtcacagctttaaacggtatttctgggctacaccctccacgccagatcggcagagtagtctcgagggtgcacaccaagccagtgggatgtggcctatctcacacagtaggagggtgtagattccatgccacacccatatgaaacgctcaatccgaatgagcgcagccttgactgtgggttgcagcccacacactctagaaatcacaacaaccaacccagacaatccagaagggagcacactcatggatggcacactcatcacaccatccttcaccagcctctacgggcagacagaaatcgacccgctcagcctccacagcctcaccggaaaccattcagacgacatcgatctggatatggtgcgccgcatgtaccacgctaaagtacaagaagccatacgactcatccgacccctatggactgtcaccctcgacggcgccatatacgggccacccgactggcgccatctatccgagaatgaggtcgaggaactccacgatctcatcgacatgatcgatgtagacgccatccttgtcgcatccacccgataaaccctcaacaacgttataagtaacgaaaaggacataatcatgcaaaagatcgccaaccacttcacccagctctacgccccagccagctacgactgccccacacccttcgacctgacacgcctcgaaaacctctcctgcgaccacatggattttgagggcctcgccgaagcctaccggcagcatgtggaagccgaacttcacaagctacgccccaacacgttcatcgcatccgatggcaccgtgttcagccacgacgagtggaagccactcacacaggcggaggcgacacaactctactggaatgtgacccgcatcaatgtgggccacctactcaccctatgcgcccgataacccccagtcgcacacaatgagcctagaatcgcctagaaatacctgacctatatagtcgtacccccaagggctgaaagtcgctccaatcctcagagcacaagcttaaaacacgaaagaaggaccaatcatacaatggacatgccacaagtgcgatagcacaatcacaggataccgaccagaacactgcacaatctgccacgaaacatttaatggcacttatgccggggacatgcacagagtagggcagcatggagtcaaggagggtccagatcgtcgcaggtgcctcactgtggacgagatgcttgccaaggggatgactcgcaaccgccatggatactggacgcaaggtagtgacatgtcacgcttacatgacaaaacgcctagccacacaagtatcgctcacaatcgttgagcgcacacttgacagtgggcccagccgctgaaagtattgatcatgtcagcaacgaacaacaccccggaaaggggaccacagtcatgaacaagaaaacaggctacaccatcgccggcgccactctcgccatcatcgccgcagcatccttcatgccagcacccgacgacaatccgccactcgcctcacagccagccccacaggtaaccacagccaacaccgaatggacccctgaaaccgtccaacagcgcaaagccgaaaagaaagcccggcaggccgccgcagaacagtcactgcgagccgaacaagccaaaacccacaagcaagcccaaacacagggtgaagaaacctcacagggtctcaccatgatcaccgcggcacacgcctgcaatgacaaggctgaacaacaggccgccgcacagggtgtcaactggaacggcaaccccgacatcgaccttcaactccacaaaattattggcaaagacacgttcagcatcgtctacggcgcaaccgtccgccagccgggagcatccaaactcccagtcaccgtccactgcctcgtcaccggaacagaagaccacccgcacgtcaccgacctcaacatcaacccgcaacagtaaccccgtcaaggaccgctatgtctctcctatcccactacgctgtcaccaccggactcgccgacacggcacacattattcaccacaccggcggcacactccgcacagccaccgacatcgcatcccgcatcaacaccctcaacccaaacatcaatctcgaccacgaaatcaaacagctacaaaccatcgaagccgacctgtacaacatttacaaaaccatcaacaccatcatccaggagcaagcatgaacacacccaacaacattgagctacacagctacgaaacgttcttcaccacactggcatggatccaaggcgccatcatcacatggatgtacgccaccggcggcacacacaaggcagccctcgccattattgccgcatgcgccctcgccaccctcctaggcgcatccaccctcaccaacaatccccgcgacacccaatgatcacaacacccatcatcatcgcagaaaccctcgccatcattattctcgccgtagcactcgcccacaaccccaaccagtaaccccacacgtaaggagcacacacaccatggatgagcccaccagcatgtacaccgaccctgatactggcgccaagaaagaattgaaactttgcaggctatccctcatcgacccagcctcccttcacgccctaggctctgtggcaggctacggtgccaccaaatacggcgacaataactggaccggcggctatccgtggagccacagcgttgacgccctctacaggcacctgttatcatggcagcaaggcaacaacctcgatgatgaatccgggctaccccatctggcacatgccgcctggcactgcctcgcactcctcgcctaccagcaacacgatgccggccaagacacccgcaacccatggaacacccacaaaggcgacaagtaatgcctctagcacaaaaaccgtccaccatcaaccatccaggccacatctcctacagctcactcacccagtgggccgaatgcggagaaaaatggcgcctccaacacggatacaaagccacctatcacacctggtatgccaccatcgccggaagcgccatacaccacatcaccgaacaatacgacctacacctgtacaatcccgccgaataccctgcactgccagacaaactctcatccttcaaaaacattttcgacacccaagtcgccctcgccgaatccgaaggcacaaacatcaaaccctccggcagaatatgcaaaaacatgtgcgaatcgggcgggccacacaaaaaagactacaattggtggatggtttacggccccacctttgtggacaggtggaaaacatggaggcgcaaccacccagaatacgccaccgctgttattgacggccagccaggcatagaatacccggtagaaaccaccctccccgacggcacaaaaatagtcggatatattgaccgggtattcaccgacaccgacaccggtgaaaccttcatcctcgacctcaaaaccggacgcctacccgccgacagtatgcagctgcacacataccggtacatgctagaacaacacgacatccatgtgacgaaaggcatgttttggacgccagccaccagccgcaacgacgacaagtccccaatacagggcacagcaaccgaactcattgatcttgacaacaacacctaccggcatgtatcatccatgtatagtcaagcaatgaaaggaatcagtgaaggcatcttcgtcccacacgttacagcactctgcaaaggatgccccgtcagggacgcctgctgggctgtagacgggaaagacgcctacagatacccgatagaaaccaccgtacagccatcccaaaccgacagtaaagaaaaggaaaacacgtgaccgacgagcacaccacagacaatgatcgactcactatcacactcaaatatggtggagactatgctgccccatggacagtaatccgcggagacaccgcagaagacatcaaacaatccatcattgacctgctaggaggattgaaagacgaaaccgtctctgaggactgggacctcgcaaccctcatcgccagcgcagcaatcctgctccaagaccgatacaatcaggcagccaaaaactatgtagacaacattgcatctaaagaaaacaccatcgtcatcgacaaaatcaacaacgcaacaagcaaagcacagctagccgatctcctcaaacagtacaaaaagatcatcaccagtaacagtgacgtgtctgaggctttccgcagcaaacgaaacagcctcacccgataaacctgacacaaaccaacacaaatagtaaaggaaacaacaatgggactcgccaactaccgcaacaacagcaacagcaccttcttcaacccctcccgaaaccaggacgccaccgccatcgccttcaaaatccgcgacgtccagcacaacaccgaaggctatggtggacaggtcgccgaccgcatctacgccgatgtcacaatcttccacaccctccaggatctcaacaacggcaccccagaaaccatccccaacgccatcatcgaaaaagtgcgaggcaacaacgaccgcccacactccatgatccgcgacctcgaagcctatctcggcgaagaacaagccttcaaactcgccaccgtacgcaccaaaaacggcttcaacgcggtcgtgctcaaaccattagacgacgccatctacgataaagttgccgaatatgtagacaagcgcgataacggccagctagacgacaccacagcccctacggatgctgacatcgacatcgactccatctgaccaccaacacaacatccaacagatagattaaggctccgatgctctctctccaacgatccttcgagagagcctcccaaacagccgccgagctgccccgcataccacaactagaacccctctaccgcaacctggacatgcacatccacaaaggggatctcgtcatgatcgcggggcggtccggcagtcaaaaatccgggctagccatgttcatcaccgccatgctcaaccagcccgccctctacatatcaggggacatgacaccctgggaggcctccacacgaatcatctcactcaacacccaacacaccaccgcccagatacaacaaaacatcgacgactacgggccagaatactatcgagacagcatccaccacggcgcacacatcacattctcattccagtcacccatcacctggaccgacatcaccatggaactacaagcctacatggaaatgtggaaccactttccccccattattgttatcgacaacctgatggacatccaagactgcgaaagtgactatcaggcccaacaagaagccatgcaatggatcacagcattaggcagagataccggatccaccattattgtcacccaccacgcaaccgacaaaaccggcaccgacatcgaacaccccccagctaggcgcgaaatcaaaaacggcctctccgaaaaaccacaactcatcctcggagtctcactgtatggtggcgaagacaacggcaacgggctcaccatccccgccgaggcacgcatcgccgtactcaaacagcgcacaggcaaatccagcccagacggaacccgatacgaacgactacgagcctaccccgaatacacattcttcggccccctagtagaaaaacagccctggaacatgaccacaacacacaaaggactatgatggccacacaacaggcacgcaaccgccgggcaggcgcagaatgggaaacacgattattgcaccagctacgcgacaccggacacgatattgaacgcctccacctcaacggtaaagaggacgaaggcgacctcatcctcacaaccagcaacaaaacctacattatcgaggcgaaagccggccagccccatctcgccgaattcgtgaaacaagccagccgggaggcacgcaactacgaaacacaccgaaacaaacaaaacaattccaccatcggactcgtagtgatgaaacagcgcaacaagccatggagcgaagcctatgtggtatcaaccctcaacgagctcctcccacacctctgacacctgccgcctcctcgacacctaccggatacggtacaacccgtccaggaacgagcaacacatcctctgcccgttccacgacgaccaccagccctccatgagcatcaacctcgacaagggcgtctggtactgccacacatgcggtgtcggaggcggactcgccaagctacaacaacgattagaagaagaaaacccgaatgtacgacagcatacgcccatacaacattgcggaacgccgccgaatccagaaagcctcggccctctacgaaacccacctcgaaaacattctcgacctgctctcggcaagaggcatcagcgaagaaacagcccgctaccaccaccttggatacatcgacaatgaccccatcccaggccatgaagactacaaccagtgcatcaccatcccatacatgtatcccgtttggggagggccagccgaaataagaaaaatgcgtttccgctgctcactcccgcacgactgcaaaacccacaaccaccccaaatacttaaccccagcaggagacacaggctccatctacaacatggccgccatggccaacccggcagccgaaatacacatttgcgaaggcgaattcgactccatgatcctcgaacaatgcggatggtcggccgtagcactacccggagccacctcgtggcaaaacttttggaccaaatttttcgaaggctacgaccacatctacatctggtccgacccagaccccgcaggcgacaagatggcccaaaccctccaggcagcactcccccaagccacccatgtgcccctcaccctgggggatgtcacagacacctaccttcaggccggaaaaacagggttgacacaagcactaaacacagtgctacaataaaaccacacaagcaacccaaacaaagaaaggcatataaaacatcatggatcccctcgacacgtgcccaatccccaaccggcgcaacaccagccaagttgccaggaggcgcatacgcctcgccatctgtgcagaaaaatgggctgatggtgaagacccactccacatcatgcacacctggggcaccacatatgatgggatgcgatccatgatccgcgccaaccccgacattaaactacccgacgacatggccaagcgtttacacaaagtatgccgggaagcctaccccaaaaaccagcccaacaggcaccgaagcggatgggacgcctacgagaaaaactactacacccacgaaatcctgttcctcaaccaattcaacatccccgccctcgaaatcctcaaccggctcgacgtctcgtggacaatgtggaaacaaatcatcaccgaaaaccatctcacacggctacaagacgaaacctacaatgcgtgccactggcactatctgaaacagcaacacccagactggaccgaccagcaaatcacacaagcccaacacgccgggaacaacaccttcaaccagttcatgcaagacgaccagccggtactatcgtgagcatctcgttcaaacccacaatcaaagacaagcgagctatacgcaacattattgtcgacgagtggctcgacgaaaaccaagtacgagacatgcccgatagtgtactacagcacattatcgaatactgctgggactccttcacagccagcaaccggtacgccgtcgcagcgcaatactggcgaggccaaaacccacccgacaacgagcaccagcgcatactagtcggctactacaaaaccgctaaacaagccatgaacgcggccaaacaattccactggaacactcggatgcaacaacaatggaaaacatggatactcccagtccacaacggcaccgtgtcagagcatttcaccaaccagaaaacactcttcgacacgcaaaccagcaaccagggtgacgccgcactgccggagcatctacaaaacgtcatgtgcggaaaaacactcaaccacaccgacggaaccgtatcgtggtgcacacgcaaaccaggacacgacggcgactgccgcacaggatggcagcccaccacacaaccgataggacatcatggcaaccaaaactgaaacccttatccaacgctacggcaacaaggctgcagacgtcctcgccgacaggtctatacccgccacacaactagcccaaatgctcacccaggccggataccccatctccgccaccgttattaaagactaccgccgcaaacaagccaacaccaccccacgagaggaggaaaaccagtgatagacaatatagaccggctactcacacagctagccaaccacgacaacgccatcgacaccatcgacgacaatctagccaacggcaccgtacggcgcacacgcatctccgaatggacactccccaacggagaaacaggccgatccgtacaaaaaattattgaccaccagcccgcaaccgacccctaccctatagacgaactcgtcaacaagctagccgaatggcagccaccaaaacccgaacaggacacccacaccgactacagcactgcggccttcgtcatcggggcaggagacttccaaatcggcaaaggcatccccggcggagaaacagcacacttcgccgacgactacctgcgctccctcatcgtcgccaaacactactggcaacaagcaggaaaaccgcaacgggtccacatcgcattcctcggcgacatgatcgaaggatacgtgtcacaaggaggcaacaacgcctggcgcacacaaacacccctgacggaacaaatcaggctcacccgcatggccatgatgcaactcatccacatgttcgaccactgccaaaacgtgacagtcacatccatccccggcaaccacggcgaagccgtacgcttcggcaaaggagtcaccacctacgacgactccttcgatgtagactgctgccgggccatcgcagaagcctaccagctcaacaaccaataccccaacctacacttttatttccccagccgagacgaaatgaccaccaccgttaatgtggccggcacacaaatcctgcacgcccacgggcaccaatggcgcaccggcaaacactatgattggtggcgcggccaagaattccacaacggcaccacatcccacatcctgatggccgggcaccggcaccacctagaaatctccgagcaaggacaacgcaccttcatccaatgcccatccatggaaggagaatccacatggtaccggcaccgcacaggcaccaccggaaaccccggactcgtgtgctacactatcaacaacaaaacaccaaacaactaccagatagcgagatgaaatagtgctatgagccgacgaccaacaaaagccgacctagccaccaccgcatcgtgggtgtgggccacagaccatcatctacgcacactcaaccgggcatgcaccaaaacagccgcacactaccccgcaatcagtgcagacgacctgtaccaagactctctactatatattgcggtgcgggaacaataccacaacctagacaacaaacactacaccaaaatgtgctacagggtagccaaacggctagccaacaaaaccatacaacacctcgaccagccgaaacccttacccgatatcattcatctagccgacaaccaaacaagcaactaaaagggagaacacacaccatggttaaaaccaccatcgacgacggaacccaaaccaccgtgctacaaaccgtaggcaccaccaccaccgccatcatcaccgacaccgaaaaccccgaaaccatcaccgccaaatacaccatcgcgaaagacggcacagccacctacagcatcagcggaaacacctacctcggcgaccaccaacacattattaaactcatgtacgactactgccactgcgtcggacgattcgacaccaacaacaccaacgacctgttcagggggtgaccagtgaaccgaacctacaccaccgccgacatcattcaagccgcacaatggatctggaacggaggaccatggaaacccagtgtggagccgggcatgccacccccaccaaccgcgccacaacaccacggcaacaacatcgtctccatgatcgatttgcagctcgccatcgacgactacaccctcacctgtgaaccatccaaacagcgaaaacacttagccaggctagccgcattcagggaagtatacgggtatgaccaaacctattcggtggcagcccagcgactcggagtcacccggcagacagtgaaacagtgggcagaccaaacactcatcaccctaacaggctacgcaaacagtagatactatccagacggcaacgacgacaacacagggatgggataaaaccatgaacaacacacacaatatcccctacactgccctcaaaacagcgatacaccgaatcatccaacaacagcccaccaacatgcaacagttggaaaacattgttggcggtgtcgaaaaccagtaccgtgtaccaatctcactcgacaatgtgaaccttactgttaaagaagtcagcctcgacgatcttgctatcgaccaggacacgctagacgagtgcagcgaaatcctatggttatgcgacagtgcaggacacccaaacaacagcaacacccgtggcaacagcgaggaccagagcccctatgcaagccaggaagcactagactggctcgccggaatcgcataccaggcaaaactactacaatcggcggccgacgagatcatgtggtctatcatccgccactgcgacaaccataaaaatgttatcggccggaacgttctcgaccaggccagcgaaactatctctacctgcctccacctgtatcagatgctcgaagacaccatcgacagcaacgaatcatagccacaccgcatatacaaaaatagtgccccagcggcaaccaccacacgatcgtggcagcaccgctggggcacacatctatattcaattatgcaacagtagactctaccgtgccaacctcagactcggctgcacgcctcggcacatagccaccaagatcagcatcgtctacaggctcgatcatgccaggatccgacacatccaccatgtgaggctcaaccaagcccgcatcatcaggtggaaccaaacccgcatccacaaccgtggctttaggcttgccggccacaaacgacgggctaccaaacgatgtagcaaccgacaacaccgcagccaccgttgctgttatcagggcagattcccacggcaaaccgcgaaacgactccgcagtatacgtgacacccgccgtcacccccaacacagcaacaaacgtttgaacaaaagtcttagccgcccgctccagtaaacctaaccaaaactgtttacccacaacagatcaccatcactttttcaaaccattaacagcagactcaagcctgctgatgcggctgcggcactccagcacgtaataccagatgctccacaaagcgtcttttgtgcgccacagcttcccggtcacaggattcttcacccacgacagggcctcgacacgtttacccaaatcaccattctgtacctgaaccacacccacatcatggtgcagcttattcaccgaaccagtaagctgtgccgacaattgtttaatctgatcatgcaaggctttcacatcagccacagttaactccccactatctccactgccgccgcagacgacggccataaatttgtcccacggaaaccacggcccaggatcgtcatgatccgactgatgccacgcattcgtaacatccacgtgcccgcaaacaccccgcctgccagccttcaaatcggctgcactaagcttcctttttggaacattatatttgtcacacaaacgtctacacaggatcgcggcacgctcaaccgcaggccacacgcgaggatccagccactgctccctcgtgtaagcatgccccggcacccggaacgaggcgtgcgaacccccatccgcgcaaatctctatacccaaactatgcggattcggcggggcatgccacccaatagtcgactccgacaagcactgcaccgtctccccaatatcacacacataatgcgccgaaccaccagacgatggggaagcaaaatagttcgccgtagacacagccctacccttacgcgaggcagacggaaaccccacatccgggcatgtcgcatgaatcaccaccctattcaccggactattcgaaccggccgagtgatgcgccgcaggaataaacctcacaacatgtcaccaccaaacactaccgtcacagccactcctttctatttgtgggatgatatagtcactataggcgacggtttcacaccctggcaggccgccgagcccgatatggtagaagccacaccgtcactatatttcacaaccaggcgaccctcagaacagtacacagacaccaccgagcggccatccttaccatctttaccatcggatccgttcacaccggcagggccacgctcaccctgcgcaccggcaacacctcgaggaccggcaggccccgatggcccctgttcgccacgctcaccggccgaaccatcccggccatcagcgccgttcacaccgtcagcacctgcacggcccggaacaccatcatggccatccgatccattcgcgccaggcaacccgtcagggccagccacaccattcaaaccgggagaaccctgcgggccaacagggccaaccagcccagccgaaccattaacaccgtcacgcccatcagcacctgcagggccttgcgggccgcgctcaccggcaggacccggcacaccctgcacgctacgctcaacacgctgagcatccacacacaagccagactggtgaagccgcaccgactcctgcccaccctgcgcacacacccgcttcacacgggcagctaaacccttggcggctgcaccattcgactgggctcgagtctgctccgaatcccgctgggaagccacagaaccataccgcaaggcacccccagccatcgccaccaacaggacaagcgacaagaacaacaatatcagggaagccttctcaaacgagcggcgctgccgcttctcctcctctaactccctcacaattcaccccccaccgctatcaacagtatccttcaaaaactcgggcaaatcaggcatcttgacaggctcaacattctcaggcaaattcgcgttatagcgatgaacaatatggcgaatattccatgtgtattcttccatcgcatcaacctgcgcagacaactgcctaagcctcttcttcgacctgtaagtaaccgcctgaatcgaaccaagaacagtagcgatagcggtacaaatagaggctacgagtgtgggtgtaagccatgacactacagccccctaccactacaaacaccacaacatatcccgcacacacaagccgcgcattacacgccgacagcaatccaattagccaccgcaggcacaccagaaggcttagacccgtcattcgtgataaacgccaaaccaaaatccttattagtaatattgtaggcttttacatcaatctgtgccgtgcccccagccgccgtagccatagacgccaccaccacaggcggactactaaactggcgatcaaacgggatcgtgtaagcatacacagcagacccgccaaacatgatcgacttagaacccgtctcgatccggggagacaacagcatccactcgcccgcatggttagcccacacagcccccgaaggaaccatcacacggtcaccctccaccggggtagggtcacaggctgcagactccccaaacgccacacgggccgctatagcacgcctatccagctgctgctgcaacccgttagacgacaacaccaaagtagccaacaattgctgatggaacacgccaggctcagccctcaacacgtcacgggcacgctccgcacgcccaccctgaacaatctccaacttggctgtgttctgctcccaatcccgagacaggacaacatagtcgtatcgggtctcaccagggcccggaagctgccccgtcaccgtctcaacactactagaagtgcacatcaccccgtgagcccaagcctgccccggcaaaacctcacacaacaccgtggaaccctgaatcgtagtgccgacacgaaaatcatccggccctttcacagacggcatattacccatcagaccagacatttgagcccaatcatactcggtcaacacaccatcaaaccctttacacacaatacccacaacaaacccccaattcttttctagaacttttgcaaatcccgcacacccgcagccaaaccagccacacgccgcgccaacaacgccgaaggattatcctcataatccccagcaatcggagtcactttcgtccacccgtcaccaggcgatacacactccacatcaatctgccgaacaatctccgcaataggccccgaacccacatccacatagatcaaatccccaggcatcaacctgccgggcccaaaccgcaacacatccgattcagccaactcgatcttaaaccccgacgtggcccccgactcttgcagcacccgctcagcctcatcaataagatgcacatgctcggaatccgtgttacgggcatccttaaacacctcgacacgatcaaaccagtcatcctcagccatagaatcaacatcctcacaaaacagccgatccttgccctcgccgcggccacccaccaccaccgaagtagccttcggggcgtcacgcacatactcccacgacacaatcgaacccgactcggcagtcaacacatgcttccgggtcacagcaggcacacaatcaaacaccaaaccccgctgatcaaacttcgcattctcaaactgattcaccgtgacagtcatccgagcccacgacaacaccggcaacaacttgtccgcaaacaagtgaaaccgggcctgaaaatccttaatatagcggccacgactctcatcatcgttcataaacaaaccaggcggaaaacgccacgcattatcccccaacacctgcttagccaccgactcagccgcacccgaatagtgggcataatcccggtccgcacgccactccataccaaccaaaccaggacgataattcacaggccacatcaacatacgccacaacaggcggatatcatcctcacacgttatagtcacccgcgaagaacgccaaggcccaaccccgtgcaccctacgcacaggcccagaaaaaatctggccaccaccataatcaacaaccagccgcgccccaggcttcgtcaacccgtcaagcctagaatgatcacccgacaccaccaactccaaagtggacaaaccattccacttcaacgacagtttcaacgactcaaaaaaattgataggcgccacacggcgataatccggtgtaaacaatattacatgcggaacaagaccagccatcaaccattcaccaagccctcaaaaacctgtactgcaccgacacaacaatggcacccaaaccaaccatctcaatattcacactcttagaaccgccaggcgggataggcgcaaactcccactctgccaaacgatccataacatcctcaaacccgttcaacagcgcagactgcttacgaggatccgtatcaatagtgatccaatcatactcctcaaccggatagtccgaagacacacgcaaaccatcaatctgcacagaccacgactccaacgggccctcaacacgaatcacaggccacgcaggcacatcacccctgttagacagattatcccagcccgaacccacaccaggcgtcaacaccacaggaaacgctgtacccttcttgccgacagggccgccacccaaccaatcctgcaacttcgcgttactaaaacgaaacttctgctcatccccataccaaaacgggtcataagccgtcaaatgcaacacatagcgggcataaccgcggttcaccggatccaccgtaaacgtgtcatcagccgaatcaaaccggcacttcaacacacgctctttaccagacggggtcttcaccgacagttcaccctcctcaccgggaggaaacgcagaccacaacgcatcataggccttcatgaaaccgtcacgaaacccgcccaccggatccacaccaacacccgacaccaggacaggtagcgtcacctcgcgaggcttcacattaaacccgcgccactccgaaccatgcacacccacatgcgtttgagaaaactgctccacctcaggaacacccaaaccgcgcaacgaatcattcaacaacatcaccggagacgaccccgtataatccgtcaaatgaagcacacgctccggatcattaccaatcaacggaaacatagaccaggtaacagtcaaaccggcacgatcagacgggtcaggaataaacatgcacaacacccccaatcacacgtaagccaacgcgttcaacgcgtcacgctgctgccgctcaatccgcttcgcaaactcgttaggatccccatacgtcggtccgttaacattcaccacaacactcttctcactcgcacgccgataccggtcatacggggtaaacgagcccacagacgatcgcacaccaaaccgggcatccaccacatcaggcagccggccagccacaccagacatcgcatccaacgccaaaccagcattaccagtaatcccctcagccaaaccggcaacaacctgccggccaacctcgtcacgaaacacccgagacggggaatgaatacccagagcagacttcgcagcacccgcaatctgagaacccatattacgcaccgtatccaacaggccactcaaagcattcctgataccgttacccaaaccggccaccacatcacggccagcagacaccaacaaagaccccatgttacccaaagcgcccctaatattgctgggcaaattccggaaaaaccccagcacactatgcacaccagaagacaccgcggaccccatagcatgcatagcagaagaagccacactcctggcaccgttaaacccgctagaggctgcaccacgaaccctagaagccatcgaactgaaaaacccgccaacagcagacgccaccgaagacaccacactccggatagcattcatcgcagaagaaacagcaccacgagccgcgttaaaaccagacctcacatgagaagcaaccgaagaaccaagccgggcaaaaaaccccacaaccgcgttcacaccgccagaaatgatcgacttgaaaccgttaataaacgcagacgtaaacgccctaatatgattccagccagcctgaacaaccgaacccatacgcgccaaaccagacaccaaatgggcaacaacccacgagatgacacgggcaacagcggcaataacacgggccacagccgacacgacagcaccaacaatacgggcaacaaacccgaccacggccgccaccatcggagccacaacagcaagaatacgggccaccacctgcaacacaaccgaaacaacctgcaccaccacacgcataacagacatgatcaccggtatcaacgaccggatcaggccaataatcggtggcagcacagacatgaccgcacccaaaatctgctgaatcaccggcatcaacaccggcaccaactgcatgaccacgccaacaacctgacgtatcacagccacaacagcctgcaacaccggcatcaacgccggcaacaacatggccgccacctgtgtcaccgcaccaataatctgcgtgatcacaggaaccagccgggcgacaagcataccaatcacaggcacaagctgggccgctagcccggcaaccaaaccgataatctggccaaacactggcgccaaccgtgccaccaaaccagcaattagaccaaacacaggctgaatagcgaccatgatctgccccaacgcctgaccaaccacagccacaagctgcatcacagcggcacggaactgggcgttcgtggcaaacatggcagcaaacagcccgatcacaataccaacagggccacccagggcgcgaaacacgccgccaagcccgccagcggcacccttcaaagcaccaaacgacggcaacagattcttcaacgacaccgccaacggggcaaaccccgcgacaagcttccccacaccggcagccacaataccaaacactgcggtgccgccagcaaacatggcagcaagatttactttagggaccggcaaatgcattctcgcaaaaatgcccttcaactgctccaccttggcgcgcatctgtgcattcattcgagtgatcatgcccggcatgcggttaatccacgccaaaatagacggcatcacccgctgaatcccctgatccaccgacgcaaacaggggcttcacagaatccgtcaccgacttgataaccggattcaacgcaacaaaaatctgccgcaacccgttaagaaacggcgccatagccgtagcaccaagataacccagggcacccttaacattcttcatagcgccctcaaacgtcttaccagacgcctgcgcagcaccacccatgccaagcttcatcgcagccgcaaacgtggcaaaatcaatctgccccttcgacaccatctgcgacacctcagccgacgttttacccgtctgcctggcaagcaaagacagcacaggaacaccagccatcgtaagctgcaacatgtcatcgccctgcaacttaccgcgcgccataaccgacgtaaaaatagcgcccgtatcctgaaacgacttacccgaaatataagacacatcggcgacagtcttcaacacatccgtcatctgcccgccagacttcacacccgaagcagacaacgccgccgcagtagaagccgcatcacccaacgcatacgacgtaccagtcacagcctcaatagccgaattcataatcgaagacgtatcagacgacgtatgacccaaaccagtcagtttagcctgagcctcatcaatagccatcgcgcgagcaataccgccaccaatagtcacatcataaatcgacttgaggcccttcttagcaacattgatggcacccaccattgcggcgccacccaaagccaacttcatgcccttagcaaacagactacccgaacgctgaccctccgcaggcatcaccccagaaagctgtttaccaacatccgccttcaaaccaggcatcttcgtatacaacgacacatatgcggaagcaatctcaccagacatacactattcaccccataatattaatctcgcgagacaccccgccaccggcacgaacacgcgccaaaatatcgtccacctgcccagacgtaaaccgggccctacgctcatccgtaggcctcgccacaggctccggctgcccctcactattagcagacctgtaatgatccagcatgtccaacacagcccactcgcaccactcaaacgggcgctgccaaccattcaggtgggccgccaactggctagacgtatcggtacacaacacgccagccagccggacagcctcaccccaacacatctgcgggccaccaacactataaacagaaacaccaaatttagtgcggaaatcgtattcgatggccccacgataatcatcaatcaggccgtggagccaaactattcccccagcgaggcacccttaccgtcaggcttatattccatccactcacggaaaatctcggccacacgaaccataggaagcccctccaaggcctccaccgcctccgctggggcggcagcctccaacatggaaaacatcacctcaacctgggcgaaatcagcagactccccagactgggaaatcctggcggcacggcgaaacacgcgggcaggaacagcctgagccgtctcctccgcatccgccaacacccaactacggtcaccaatcttcaacgtgtaacctgtgtcactcatctatcaacaatccctcaaactatgtgtatcagttattagacggcggattaggatccggctcaggcttcggagaaggaggaaccggaggagtatcagcttttaaagccgtcatccacccccgaccagacaccgcatcacccttcttattaatctgggcaggatacgccttcaacgtcacaccatacccatacacctcgccattcttacccttaatctcgtcacgatcgacaagctcaacctcaggaaaatagtagcggataacctgatcgccatccacaatatccatcaacagggcgtgaacacccgtcgtggcaccaggagaaatatcgaacgaacccgaatcggatccggcagtaaccttcgactgccaaaacagttcaataacctccttcttagactcgatcagctggaaagaaatctcgatagacgactctgtagccacagtgcgaacaacatccgcattctgccaagccttcaaatcatccgttttacgctcaggcttaatcttaaacccgtcatccgacagatagcctaaagcggtaagaccttcaggaaccgtcttcacaccatcaatagtgtcaccggcatgagctttaccaatatagacgtcgccagtaacagcagaacgaacattagacgctttacgtgttgcagccatcataacccccattaaatatcaaacaattacattaaaacaaaaacaataagcttattcagactccgcaggcctacatatcagctcgaacagcgaatacacatcaaaacgtgcaccatcaaccagcaaatcaggacccgtagaacgcctacaaaacaccaccggatcaccatcaaccccgtcagccagaacagcctcaacacgacgcgccaaagacatagcccgatcaggcgtatcagaaaacacattcacgcgcaaaaaaacacgctcacgaacatgcaactgcgggccaccatccaacgccaaccaaatcaggtcacccgtaaaatcatcgggcaccgtccccacacagggtatatcggacagccagccatcatccgccaacacacgtttagcccacttcctggggtcatcgtagacgatcacgacgcagccccaatcgaacgagccagcgtgccatgcttcgcctcaatacgcttcccacccttataggtggtgccaatcctcgccacagcctcaacccggtgaacctgcacctccgacgacaaaccgctacggtattgggccctatcaaaagcattaccgcccacattcgccgaggccgcacgcctcacacgctcaccacgctcagccaacatcgcctgcaccccagaagacttcaacacctcacgaatacccggcaagttcagcttcacactcacatcctgagccacaacctatcagcccttcttacgcttcacattgatctgcgtacccgcatcccaaccggacatggggtgatgccacacgataggagatccgtcagcctcccacacaacaccccggatacgccacctgcaacgataaccggcacccacaacaggctgcttgaaaagcatcgaccaatgctcatagtcagagtcacgccccgcggcctcatcctcctgcgacacagaagcataaacggccacgttatggtacacagtctcgacaggcttagaccaatcctcaaccttgtcgccaagatcatcgacacgaacagtcggttgaagcataacaaccgtttcaccgtaaggaaaactggtcatatcatatctcccacaaagggccagcgtagccgttaatatcagatccgcacgagcaaccctcaccccacacagtggaacacacctcagaatgtgcatatcgaccattaatagtgggtgtgatagtgaacgctttaccagccccatcatcaccctcacacagcttcttcaacgcagcaatctcggaaggccacaacaaattcgtgggagtactagaccgtgtagtctgagcgaaaggacccgcagactcatactgcacctgacccgacacgccagtatcattccagcgcaacaaagccctacgcagaatagccttagcggcatccttgtatttgaaatccggtttagcgatacagggggcgacactgacagccacagcctccacatcagcaatcatcgcctcaagcttcccttcaggaatatcggcgaaaggctcaatatcctcaggcttcaaaatgatacccatcaacaccaccccctgcacacagcataaacattatcgcaacaaatgaatcagttctcggccggcggattaggcttcggggcagccttctccttcacaacagcaaacgaatcaagcgactcgatagccacatacagcacagcctcggcacgaaccataacctcattatggcccttcaggtcacgccccgtctgatccgggtcaccatactcgataagctcgatcgggaagttacgctggaaaccccaatgaacacgcgagaaatcaccaacaatagccttaacaccagaggcaggcgacatctctggggcaccagaaacagtcgaagaagcaccaacattcaagccgcgccaattatccaggccggcaaacccggcggcaggatacataggctggccggcaagcggcgaacccttcggatacacctcagtagacacggcaaacgagaacgccggatccaaagcaacaccgttaggaacctgcaaaccagccccagcgataagaccgacagccttgaccagatcggtcgtagcagaatccgtggcatcaacaacattcttagtcttatccagcgaagtcttcacagcggcagccgctttaccagtggcaggatcaataccatggaaagcaatcagatccacggcacgaccaatcgaagcaccaagagcaggcgaaataagatcctgcaaaacacccagacggtaatcagcatcagcccacataaactcgtcgcttacgcgctgctgagtcacaaccttgataggctgcgcagtaaacgccgaaacatcaacagacgcggaaggcttaacctcgccctcaccaacaatcttagcgcgaggaacaccactaaacacggcacccttaacagggccaaaaatagtcggctgctccggcgaaagcttcgccaaaacaccagaatcgatagcacggtcacgaaccgcaccaatcatagaaccaggaagctcaagcttccctgcagaaagaaaatcgtcagccatgataaatcatctcctagaattattgacaagagcatccacaaacgcgacaccctcacgtcgtttaacatcatcaacgggggcactccccgcaagacggcgcacacccgcgccaccactactatggtcgatcaaacccttcaaagctttcgcagactcggcaagcgactccttatcgccacccgacaagaaagcgatcgcatcactggacaaaccatactctgaagccacctcgcgcttcacaccctcaagaacaaacccgttgatcctgtcttcgagttcctcattcttgcggcgaagctcatcaatagtagatccagaatcgtcactcgatgtacgaagcttctccaactcggcaaaattacttttagcacgagactcccatttacgggcctcagccttccaatcagtccccggcgatttaccctcgccttcattcttcaactgattgtcggctacctcctgcccgccatcgtcttttactgtatcaacaatgccgttatcctttccggactccacaacatcattgtcaacattctgttcctcaacattctgatcggccatagcctaaccctacactccttgcggaaaacaacacgatattattgacccccgtgcgggagacaaccctgtgcaccaataaccggcggcacacaaccggaaaccacatcaaattatctcatgccaccaacagtacgcatagccttcaaaatattgccaggcgactgctgcaaaccatgatcatcaacccactcacgggccttctcatacgtcctctgatatgcggcatcagccctatttggttcccaagggccaacaacctcaaccaccgtacaaccacaatgatcatgatacttcgaaccaaacgggcgcttaccggcacgcttatgacgccgagtatgaccggtagtgagtgccctttctttggtcgtataatccgacctcgtagccaacatggcacaaaacgcgcacggatcaccatcagtcaccctgcgccacgacctaccctgcgcacccgcagaccactcaaccgtgtcacggccagcattcataacagcccgattaacacccgcagccatcgcatcaatcgtgtcattcgccctatccgggtcactctcaagaatcttcatagtcgaaaacgacctcgccaaagccgccgcagcatcaaactcgtcatacacaatcaaaccaggatccacaccattcaaccggcgaaaatccgacacaaacttggcagccagcgctgccgaaccatcatggccggcacgctccaactccacacacaaacgcacatactgtgtgtcattcatcctgccggcacgccacaaacgaccaagctcagaataatacccagcgtatttcccggcaaaacgaatcgcctgccgctgatactcagtcgcagcaagcctcgacatagcacccgaagccatcgcctatcaaacctcgttagtttgacgcgatatagccccagccagtgccgccaacggatccgaagactcggcacgatgacgcatcacagcctcaacctgcacatcatcaagccccaacatctccaacaccgtccgagaatcagcaggcaaaataccggcacccacaagcttcgtcacagcatcagccgtagccgcccgagtcggggttgaagcatcacgccacctcaaacccacatcaccaaaaaaatcggcctcatcaacacgagaatccaacgctttggcagccaggaaaccaaccgacagccagccctgaccaaacgacgtctgccggcgttcagcacgcttcacaagccgagattcctcggcagccaaagcctccccgctaggtgggttagacgtgataaacccgaaatagcgttccggaacagccgcctcacccgcagtcaactgcgccaacagtctcatctgatccgaatacggtgtaggcgaattgacaggaaatgaccccacattcggagtgtcaccgtcatcatccttatctacagcccacacagaagccatcgacaggacccagccaggctgcgaaaactcatccgcgctcacgccagtcacccaacgctgaggataagcataaaaatcacgattcacagactgccccaacagtgtgcgcacagcctcatccgtgtaagccctaatcgaccgagtgatctccgaacggccatcaatcctcgacgtgcgacgacgattcacaataggcaccaacggaaccgcacccaacacattctcaatacggcccgtctcaacccactcacgagacccccgccgctccacctgaacaatcacatcaggaagcaacaactccgcctcaacaacctcaggatcacacgtctgctgcaccacaaggccagcatccaaacgagacccatcggcagaaaaccggccagtacaattcttgggcgactgcggacgaaccgacaccgtaccatcaccctggggaatgatagccacaaacgacaacccaaaaattagtgcatcaaggtggacgtcacacgacgccgtagcaagccgattcgcagcatacacaccatccaggccgtagccgtcaccattagtccagccaagccaatccagacgctcctccaaagcatccaccgcaatcccaggccacgacaccacagtctgcacacgctgcaactccggaggaatagccacccccaaatcacgcacccgattagagccctcatagtaaccctcaatgcgacaatgccacgaagacaacctttgaatacgatcaaacatgccctcaatcagagccaactcatccgagttcataccacagacacccgcttcctaccagaccgttcacgccgcttcgctttcgccatcttcgcaccaagatacgccaaagacacagcctccaaaggaacctcagaaccatccttaaacgaggaaccccaaccccacgcagaacctttcttcttctgcacagccgacctcacagcaatatccaacatgtcacgcctcgaatcggcacgaggatgactgatcacacccgaacgcacaccctccagaaacgcttgacacgcctccacatacacaccagtatcagcaaccaccacgccacggcccggaacaccacgatccgtcaacgccttctgcaacaacaccgcaccagacccggcaaccatgatcttttcagtgtcaccccaacgaaccgccaaccaatcagccagctggcccacaccatcaacaatcgtccccgacaggccatcaataacctcaacatgaacaccagcatcagtcctgccagcaccagccaacgcgacacgatcccccgagcgagaaaacgagacaccaaacaccttcccgcaaaccagactcgcctcaaccacagcagactgaacccacttatcagccggtatcaccgacgtagcagactggccacgatcccaccagccaagccgctcccgagcaaacccggcagcagacatcgactcatgctcatccgacacagtcccaaaattcagacgacgccccaacgcaggattcgtatcccccgccaacttccgccactgccgcgacacatcatccggatcagactcgtcaggaatcgaaaactccgtccacgcaaaccttttaccacccgacaaagcctgcccacgaagacgcaacaccacagacccgtcagccaacggcccaggcggcgtacccaaaaaaatctgctgaggatcaccagacggggcagcgctcacggtaggaagcaaagcctccaactgctcatccgacaactcctgagcctcatcacacaccaaatcatcaaccgtaaacccgcgagcagaaccccggctacgggccacaaactcaaccgaaccccaacccggacaaccacacttacgctcaaacgtggcacaatccggatgatgcaacacaatagcctcctgaccattcgtcgcccgaatcgacttcaccatacgatacaagtcaggaaactgccgctcattctcaaaaaacgaccgcaaccgcataaacgctttacgagccgacttcaactcgtgagccgtatgcaaaatacggcgaccctgaatagtcgccttaaacaactccacaatctccaaaatagcattcttgccattctggcgaggcacaaacaccccacacacacccgaagcaagcctgccattgctacccacagcaagccaatcatccaacacctgctgctgccacggatcaggcgtcaacccatacgcacgacccaactccccagcatcacccccagcagacaccgaatacgccgcagccacacggtgacgaggaacctgagacccaacaacaccagacacctactcaggcccccttgcgcttcctataccggtcaatcatcgccaccgcagaacccccaccacggccaccagacaccacatcaaccgaataccgatccaacatgcccataaacgccttcacatgagcacgaagcgaagccaccaaatccgcgcgaccctcacgccaaacacaatcatgaatcaccgcagcatccataagaaacagccactcctcatcagacacatacgatgcacggctatcctcaccccacacacgccaccaacgacgcgtctccccacaccactcacgactatcaggaagctcaggctgcacaacactcaccaccaacacaaaaagtcgacaaacagacaaaaccacaaaagggaggtatttcactagatcggaagagaacacct

SEQ ID NO: 4 - DNA, 29491 bp, Propionibacterium acnes bacteriophage
ggatttcgatatgttcattagtgagtggagttcagtcgtgtgctcttccttctagtgaaatacctcccttttgtggttttgtctgtttgtcgactttttgtgttggtggtgagtgttgtgcagcctgagcttcctgatggtcgtgagtggtgtggggagacgcgtcgttggtggcgtgtgtggggtgaggatagtcgcgcgcagtacgtgtctgatgaggagtggctgtttctcatggatgctgcggtgattcatgattgtgtgtggcgtgagggtcgcgcggatttggtggcttcgcttcgtgctcatgtgaaggcttttatgggcatgttggatcgttattcggttgatgtggtgtctggtggccgtggtgggggttctgcggtggcgatgattgaccggtataggaagcgcaagggggcctgagtaggtgtctggtgttgttgggtctcaggttcctcgtcatcgtgtggctgcggcgtattcggtgtctgctggcggtgatgctggcgagcttgggcgggcgtatggtttgactcctgatccgtggcagcagcaggtgttggatgattggcttgctgtgggtggtaatggcaggcttgcttcgggtgtgtgtggcgtgtttgtgcctcgccagaatggcaagaatgctattttggagattgtggagttgtttaaggcgactattcagggtcgccgtattttgcatacggctcacgagttgaagtcggctcgtaaggcgtttatgcggttgcgttcgttttttgagaatgagcggcagtttcctgacttgtatcgtatggtgaagtcgattcgggcgacgaatggtcaggaggctattgtgttgcatcatccggattgtgccacgtttgagcgtaagtgtggttgtccgggttggggttcggttgagtttgtggcccgttctcggggttctgctcgcggttttacggttgatgatttggtgtgtgatgaggctcaggagttgtcggatgagcagttggaggctttgcttcctacggtaagtgctgccccgtctggtgatccgcagcagattttccttggcacgccgcctgggccgttggcggatggttcggttgtgttgcgtttgcgtgggcaggctttgtcgggtggtaaaaggtttgcgtggacggagttttcgattcctgacgagtctgatccggaggatgtgtcgcggcagtggcggaagttggcgggggatacgaatcctgcgctgggtaggcgtctgaattttgggactgtcagtgatgagcatgagtcgatgtctgctgccgggtttgctcgtgaaaggcttggctggtgggatcgtggccagtctgcttcgtcggtgattccggcggataagtgggttcagtctgctgtgggtgaggcggctctggttggcgggaaggtttttggtgtctcgttttctcgttcgggggatcgtgtcgcgctagctggtgccggcaggactgatgctggtgttcatgttgaggtgattgatggcctgtctggcacgattgttgatggtgtgggccagctggctgactggttggcggttcgttggggtgacactgaaaagattatggttgccgggtctggtgcggtgttgttgcagaaggcgttgacggatcgtggtgttccgggccgtggcgtgattgtggccgatactggcacctatgtggaggcgtgtcaggcgttcctggagggtgtcaggtcgggtgtgatcagtcatcctcgtgccgattcgaggcgtgacatgttggatattgctgtgaggtcggcggttcagaaaaagaaaggctctgcgtggggttggggttcctcgtttaaggatggttctgaggttcctttggaggctgtgtctttggcgtttttgggggctaaacgtgttcgtcgtggccgtcgggagcgtagtggtaggaagcgggtgtctgtggtatgaactcggatgagttggctctgattgagggcatgtttgatcgtattcaaaggttgtcttcgtggcattgccgtattgagggctactatgagggctctaatcgggtgcgtgaccttggtgtggctattccgccggagttgcagcgtgtgcagacggtggtgtcgtggcctgggattgcggtggatgctttggaggagcgtctggattggcttggctggactaatggtgacggctacggcctggatggtgtgtatgctgcgaatcggcttgctacggcgtcgtgtgatgtgcatttggatgcactgatttttggtttgtcgtttgtggctgttattccccgggatgatgggtcggtgttggttcgtccgcagtcaccaaagaattgtacgggcaagttttcggctgatgggtctcgtttggatgcgggtttggtggtgcagcagacgtgtgatcctgaggttgttgaggctgagcttttgcttcctgatgtgattgttcaggtggagcggcggggttcgcgtgaatgggttgaggtggatcgtatatcgaatgtgttgggtgcggttccgttggtgcctgttgtgaatcgtcgccgtacgtctaggattgatgggcgttcggagattacgaggtctattagggcttacactgatgaggctgtgcgcacactgttggggcagtctgtgaatcgtgatttttatgcgtatcctcaacgttgggttacgggtgtgagcgcggatgagttttcgcagcctggctgggtcctgtcgatggcttctgtgtgggctgtggataaggatgatgacggtgataccccgaatgttgggtcgtttcctgtcaatagtcctacaccgtattcggatcagatgcgtttgttggcgcagttgactgcgggtgaggctgcggttccggagcgctatttcgggtttatcacgtctaacccgcctagtggggaggctttggctgccgaggagtctcggcttgtgaagcgtgctgaacgcaggcagacgtcgtttggtcagggctggctgtcggttggtttcttggctgccaaggcgcttgattcgagtgttgatgaggccgcgtttttcggtgatgtgggtttgaggtggcgtgatgcttcgacgccgactcgggcggctacggctgatgctgtgacgaagcttgttggtgccggtattttgccggccgatagccgtactgtgttggagatgttggggcttgatgatgtgcaggttgaggctgtgatgcgtcatcgtgccgagtcttcggatccgttggcggcactggctggggctatatcgcgtcaaactaacgaggtttgataggcgatggcttcgggtgctatgtcgaggcttgctgcgactgagtatcagcgtgaggcggtcaggtttgctgggaagtatacgggctattatgccgagttgggtcgtttgtggcgttccgggaagatgagtgacacacagtatgttcgtttgtgtgtggagttggagcgtgccggccatgatggttcggcgtcgttggcggcccggtttgtgtcggattttcgccggttgaatggtgtggatccgggtttgattgtgtatgacgagtttgatgctgcggcggctttggctaggtcgttttcgactatgaagattcttgagagcgacccggatagggcgaatgacacgattgatgcgatggctgcgggttttgatcgggctgtcatgaatgctggccgtgacacggttgagtggtcggcgggtgcgcagggtaggtcgtggcgcagggtgacggatggtgatccgtgcgcgttttgtgccatgttggctacgaggtcggattatacgaccaaagaaagggcactcactacgggacatacgcggcgtcataagcgtggtggtaagcgtccgtttggttcgaagtatcatgatcattgtgggtgtacggtggttgaggttgttggcccttgggaaccaaatagggctgatgtcgagtatcagaggacgtatgagaaggcccgtgaatgggttgatgatcatgagttgcagcagtcgcctggcaatattttgaaggctatgcgtactgttggcgatatgcgataatttgatgtggtttccggttgtgcgccgccggttatcggtgcacaaggttgtctcccgcacgggggtcaacaatgttgtgttgttttccgcaaggagtatagggttaggctatggccgatcagagtgttgaagaacagaatgttgacaatgatgctgttgagcccggaaagggtggagacattgttgatgttgtgaaggatgggcaggctgccggcgatgatcatgccggtgatgtttccgtgaaggaggagtcttcttctggcacggattggaaggctgaggcccgtaagtgggagtctcgtgctaaaagtaatttcgccgagttggagaagcttcgcgcctcggatggtgatgcggggtctgtgattgatgatcttcgccgcaagaatgaggaacttgaagaccggatcaatgggtttgttcttgagggtgtgaagcgtgaggtggcttcagagtgtggcctgtcgggtgatgcggtcgctttcttacacggtggcgatcgtgaagcgctggtggagtctgctaaggctttgaagggtttgatcgaccagagtagtggtggcgcgggtgtgcgccgtcttgcggggagtgcccccgttgatgatgttaaacgacgtgagggtgtcgcgtttgtggatgctcttgtcaataattctaggagatgatttgtgatggctgacgattttctttctgcagggaagcttgagcttcctggttctatgattggtgcggttcgtgaccgtgctatcgattctggtgttttggcgaagctgtcgccggagcagcctactatttttggccctgttaagggtgccgtgtttagtggtgttcctcgcgctaagattgttggtgagggcgaggttaagccttccgcttcggttggtgtttcggcgtttactgcgcagcctatcaaggttgtgactcagcagcgtgtgagcgacgagtttatgtgggctgatgctgattaccgtctgggtgttttgcaggatctgatttccccggctcttggtgcctcgattggtcgcgctgtggatctgattgctttccatggtgttgatccggctacgggtaagcctgctgcggctgtcaaggtgtcgctggataagacgaagaagacggttgatgccaccgattccgctacggctgatcttgttaaggctgttgggcttatcgctggtgctggtttgcaggttcctaacggtgttgctttggatccggcgttctcgtttgctctgtctactgaggtgtatccgaaggggtctccgcttgccggtcagccgatgtatcctgccgccgggtttgccggtttggataattggcgcgggctgaatgttggtgcttcttcgactgtttcgggtgccccggagatgtcgcctgcctctggtgtgaaggctattgtgggtgatttctctcgtgttcattgggggttccagcgtaacttcccgatcgaactgatcgagtatggtgatccggatcagactggccgtgacttgaagggccataatgaggttatggttcgtgccgaggctgtcctgtatgtggctatcgagtcgcttgattcgtttgctgttgtgaaggagaaggctgcaccgactcctcctccggctggtaactgatacaagataagcgaatgtgtactatgtgcagggggtggtgttgatgggtatcattttgaagcctgaggatattgagcctttcgccgatattcctagagagaagcttgaggcgatgattgccgatgtggaggctgtggctgtcagtgtcgccccctgtatcgctaaaccggatttcaaatacaaggatgccgctaaggctattctgcgcagggctttgttgcgctggaatgatactggcgtgtcgggtcaggtgcagtatgagtctgctggtcctttcgctcagactacacggtctaatactcccacgaatttgttgtggccttctgagattgccgcgttgaagaagctgtgtgagggtgatggtggtgctggtaaagcgttcactatcacaccgaccatgaggagtagtgtgaatcattctgaggtgtgttccacggtgtggggtgagggttgctcgtgcgggtcgaatattaacggctacgctggccctttgtgggagatatgatatgaccagttttccttatggtgaaacggttgtgatgcttcaaccgactgttcgtgtcgatgatcttggtgacaaggtggaggattggtctaagcctgtcgagactgtgttccataatgtggccatctattcttcgttgtcgcaggaggatgaggctgcggggcgtgactcggattatgagcattggtctatgcttttcaagtcccctgttgttggcgctgattatcgttgccggtggcgtatccggggtgttgtgtgggaggctgacgggtctcctgtggtgtggcatcatccgatgtccggttgggatgctggtacgcaggttaatgtgaagcgtaagaagggctgatagattgtggctcaggatgtgaatgtgaagctgaacttgccgggtattcgtgaggtgttgaagtcttctggggtgcaggctatgttggctgagcgtggcgagcgtgtcaagcgtgcggcctcggcgaatgtgggcggtaacgctttcgataaggcccaataccgtaatggtttgtcgtcggaggtgcaggttcaccgtgttgaggctgtggcgaggattggcaccacctataagggtgggaagcgtattgaggcgaagcatggcacgttggctcgttcgattggggctgcgtcgtgatcatttacggtgatccaagagtctgggctaaacgtgttttggcggatgatggctggctgtctgatataccttgtgtggggacggtgcctgacgatttcagcggtgatctgatttggttggctcttgatggtggcccgcagttgcatgttcgtgagcaagtttttttgcgggtgaatgtgttttcggatacgccggatcgtgctatgtcgttggcgcgtcgtgttgaggctgtgctggctgatggtgtggacggtgaccctgtggtgtactgtaaacggtctactggccctgatttgctggttgatggtgcacgttttgatgtgtattcgctttttgagctgatatgtaggcctgcggagtctgaataagcttattgtttttgttttaatgtaattgtttgatatttaatgggggttgtgatggctgcaacacgtaaagcgtctaatgttcgctctgctgttacgggtgacgtctatattggtaaagctcatgctggtgacactattgatggtgtgaagacggttcctgatgggcttaccgctttagggtatctgtcggatgacgggtttaagattaagcctgagcgtaaaacggatgatttgaaggcttggcagaatgcggatgttgttcgcactgtggccacggagtcgtctatcgagatttctttccagctgatcgaatccaagaaggaggttatcgaactgttttggcagtcgaaggttactgccggagccgattcgggttcgttcgatatttctccgggtgctaccactggcgtgcacgctttactgatggatattgttgatggtgatcaggttattcgctactatttccctgaggttgagcttatcgatcgtgacgagatcaagggcaagaatggcgaagtgtacgggtatggtgtgacgttgaaggcttaccctgctcagattaataagactggtaatgcggtgtctggtcgggggtggatgacggctttaaaagctgatactcctccggccccggttcctccgaagcctgagccggatcctaatccgccgtctgagaactgatacacatagtttgagggattgttgatagatgagtgacacaggttacacgttaaagattggtgaccgtagctgggtgttggcggatgcggaggagacggctcaggctgttcctgcccgcgtttttcgccgtgcagccaggattgcccagtcgggggagtctgcggatttcgcccaggttgaggtgatgttttctatgttggaggctgccgccccagaggatgctgtggaggccttggaggggcttcctatggttcgtgtggccgagattttccgccagtggatggaatataagcctgacggtaagggtgcctcgctgggggaatagtttggctccacggcctgattgatgattatcgtggggccatcgaatacgatttccgcaccaagtttggtgtttctgtttatagtgttggtggcccgcagatgtgttggggtgaggctgtccggctggctggcgtgttgtgtaccgatacgtctagccagttggcggcccacctgaatggttggcagcgcccgtttgagtggtgcgagtgggctgtgttggacatgctggatcattacaggtctgctaatagtgaggggcagccggagcctgtggcgaggccgacggatgagcgtagggcccggtttacgtctgggcaggtggacgatattttggcgcgtgttcgtgctggtggcggggtgtctcgcgagattaatattatggggtgaatagtgtatgtctggtgagattgcttccgcatatgtgtcgttgtatacgaagatgcctggccttaaaagtgatgttggtaaacagctttccggggtgatgcctgcggagggtcagcgttcgggtagcctgtttgctagcgggatgaagttggctttgggtggcgctgcaatgatgggcgctatcaatgttgctaagaagggcctcaagtctatctatgatgtgactattggtggcggtattgctagggcgatggctattgatgaggctcaggctaaactgactggtttgggtcatacgtcttctgacacgtcttcgattatgaattcggctattgaggctgtgactggtacgtcgtatgcgttgggtgatgcggcttctacggctgcggcgttgtctgcttctggtgtgaagtctggcgggcagatgacggatgtgttgaagactgtcgccgatgtgtcttatatttcgggtaagtcgtttcaggatacgggcgctatttttacgtctgtgatggctcgcggtaagttgcagggcgatgacatgttgcagcttactatggctggtgttcctgtgctgtctttgcttgccaggcagacgggtaaaacgtcggctgaggtgtcgcagatggtgtcgaaggggcagattgattttgccacgtttgcggctgcgatgaagcttggcatgggtggtgctgcgcaggcgtctggtaagacgtttgagggcgctatgaagaatgttaagagcgccctgggttatcttggtgctacggctatggcgccgtttcttaacggcctgcggcagatttttgttgcgttgaatccggttatcaagtctatcacggagtctgtgaagcctttgtttgcgtcggtggatcaggggattcagcggatgatgccgtctattttggcgtggattaaccggatgccggctatgatcacaagaatgaatgcacagatgcgcgccaaggtggagcagttgaagggcatttttgcgagaatgcatttgcctgtccctaaagtgaatttggctgccatgtttgctggcggcaccgcagtgtttggtattgttgctgcgggtgtggggaagcttgttgcagggtttgccccgttggcggtgtcggtgaagaatctgttgccgtcgtttggtgctttgaggggtgccgctggcgggcttggcggcgtgtttcgcgccttgggtggccctgtcggtattgtgatcgggctgtttgcggcaatgtttgctacgaacgcccagttccgtgccgctgtgatgcagcttgtggctgtggttggccaagccctggggcagatcatggtcgctattcagcctgtgtttggtctaattgctggtttggtggcgcggttggcgccagtgtttggccagattatcggtttggttgccgggctagcggcgcagcttatgcctgtgattagtatgcttgtcgcccggctagttcctgtgatcacgcagattattggtgcggtgacgcaggttgctgccatgttgttgcctgcgcttatgccggtgttgcaggctgttgtggctgtgatacggcaggttgttggcgtgatcatgcagttggtgcctgttttgatgcctgtgattcagcagattttgggtgctgtcatgtctgtgctgccacctattattggcctgatccggtcgttgataccagtcatcatgtctgttatgcgtgtggtggttcaggttgttgcggttgtgatacaggtggtggcccgtattcttgctgttgtggctccgatggtggcggccgtggtcgggtttgttgcccgtattgttggtgctgtcgtgtcggctgtggcccgtgttattgccgctgttgcccgtgtcatctcgtgggttgttgcccattttgtgtctggtttggcgcgtatgggttcggtggttcaggctggctggaatcatattagtgcgtttacgtctgcgtttattaacggtttcaagtcggtgatttccggcggcgtgaacgcggttgtggggttttttgcccggctgggttcttcagtggctagccatgtgaggtctggttttaacgcggctcgtggcgctgtttcttctgcgatgaatgctatccggagtgtggtgtcttcggtggcgtctgctgttggcggatttttcagttcgatggcgtctagggttcttagtggtgctgtgcgcgggtttaatggtgcccggagtgcggcctcgtctgctatgcacgctatggtgtccgctgtgtctaacggtgtgcatagtgtaataggttttttcaggaatcttcccagtaatattaggggcgccttgggtagtatggggtccctgttgatgtctgcgggccgtgacgtggtgtctggtttgggtaatggtattaagaatgctatgagtggcctgttggatacggtgcgtaatatgggttcccagattgcgaatgctgcgaagtctgctctgggtattcattccccgtctcgggtgtttcgtgacgaggttggccggcaggttgttgccggtttggctgagggtattactggtaatgctggtttggcgttggatgcgatgtcgggtgtggctggtcggcttcctgatgcggttgatgcccggtttggtgtgcgatcgtctgtgggctcgtttaccccgtacgaccggtatcggcgtgcgagtgagaagagtgttgtggtgaatgtgaatgggcctacttatggtgatcctgccgagtttgcgaagcggattgagcggcagcagcgtgacgctttgaacgctttggcttatatgtgagtaaaggggtatgcatgtttattcctgacccgtctgatcgttctggtttgactgtgacctggtctatggatccgctgtttggcgatgagcgtgtgcttcatttgacggattatacggggtcgtctccggtgatgttgttgaatgattcgttgcgcggtttgggtgtgccggaggttgagcatttttctcaaactcatgttggggtgcacggttcggagtggcgcgggtttaatgtgaagcctcgcgaggtgacgctgccggtgttggtgtcgggtgttgacccggatccggtgggcgggtttcgtgacggttttttgaaagcctatgacgagttgtggtctgcttttcctccaggcgaggagggggagttgtctgtgaagactcctgccggtcgtgagcgtgtgttgaagtgccggtttgattcggtggatgacacgtttacggttgatccggtgaatcgcggctatgcccgctatgtgattcatttgacggcctatgacccgttttggtatggggatgagcaaaagtttcgttttagtaacgcgaagttgcaggattggttgggtggcggccctgtcggcaaggatggtactgcgtttcctgtggtgttgacgcctggtgtgggctcgggttgggataatctgtctaataagggtgatgtgcctgcgtggcctgtgattcgtgttgaggggcctttggagtcgtggtctgtgcagattgatggtttgcgtgtgtcttcggattatcctgtcgaggagtatgattggattactattgatacggatcctcgtaagcagtctgcattgttgaacgggtttgaggatgtgatggatcgtttggcagagtgggagtttgctcctattccgcctggcggttctcggagtgtgaatattgagatggttggtttgggtgccattgttgtgtcggtgcagtacaggtttttgagggcttggtgaatggttgatggctggtcttgttccgcatgtaacgttgtttacgccggattatcgccgtgtggcgcctatcaatttttttgagtcgttgaaactgtcgttgaagtggaatggtttgtccactttggagttggtggtgtcgggtgatcattctaggcttgacgggttgactaggccgggtgcacggctggttgttgattatggtggtggccagattttttctgggcctgtgcgtcgggtgcacggggttgggccttggcgttcttcgcgggtgactatcacgtgtgaggatgatattcgtctgttgtggcgtatgctgttgtggcctgtgccttatcgttccagcatcattgggatggagtggcgtgccaatagggattatgcccactattcgggtgcggcggagtcggtcgctaagaaggcgttgcgggataatacttggcgttttccgcctgatatatttatggtggatgataagagtcgtggccgctatattaaggattttcaggcgcggtttcacgtgtttgccgataagttgttgccggtgttgtcgtgggctcggatgactgtcacggtgaaccagtttgagaatttgaagcaggatcagcgtggtttactgtttgattgtgtgcctgctgtgacgcgtgaccatgtgttgactgccgagtctgggtctattgtgtcgtgggagtatgtgcgtgacgcccctaaggctacgtcggtggttgtgggtggccgcggcgaaggcaaagatcggctgttttgtgaggattttgacgcgttggccgaggatgagtggtttgatcgtgtcgaggtgtttaaggatgcccgtaacacggattctgagcatgtgcatcttattgatgaggcggagcgggtgttgtccgagtctggggccacgtcggggtttaagatcgagttggctgagtcggatgtgttgcgttttgggccaggcaatctgatgccgggtgatttgatctatgtggatgtgggctcggggcctattgcggagattgttcggcagattgatgtggagtgtgtatcgcctggtgatggttggacgaaggtgactcctattgcgggggattatgaggataatccgtcggccctgttggctcgccgtgtggctgatttggctgcgggtgtgcgggatttgcaaaaattttagaaaagaattgggggtttgttgtgggtattgtgtgcaagggttttgatggtgtgttgaccgagtatgattgggctcaaatgtctggtctgatgggtaatatgccgtctgtgaaagggccggacgattttcgtgtgggcactactgttcagggtgccacagtgttgtgtgaggtcctgccggggcaggcttgggctcacggggtgatgtgcacgtcgaatagtgttgagacggtgaccgggcagcttccgggccctggtgagacccgatacgactatgtggtgttgtctcgggattgggagcagaacacagccaagttggagattgttcagggtggccgtgcggagcgtgcccgtgacgtgttgcgtgcagagcctggcgtgtttcatcagcagctactggctactttggtggtgtcgtctaacgggttgcagcagcagttggatcggcgtgctatagcggcccgtgtagcgtttggggagtctgctgcgtgtgatcctaccccggtggagggtgaccgggtgatggttccttcgggggctgtgtgggctaaccatgctaacgagtggatgctgttgtcccccaggatcgagacgggttctaagcagatccagtttggtggttctgctgtgtatgcttatacgattccgtttgatcgccagttcagtagtccgcctgtggtggtggcgtctatggctacggcggctgggggcacgcagcagattaatgtgaaagcctacaatgttactgccaatgattttcagttggcgtttattacgaatgacgggtctaagccgaatggtgtgcctgcggttgctaactggattgctgtcggcgtgtaatgcgcggcttgcgggtatgtgacatgttgtggtggttgtagtggtagggggctgtagtgtcatggcttacacccacactcgtagcctctatttgtaccgctatcgctactgtccttggttcgattcaggcggctacgtacaggtcgaagaagaggcttaggcagttgtctgcgcaggttgatgcgatggaagaatacacgtggaatattcgccatattgttcatcgctataacgcgaatctaccggagaatgttgagcctgtaaagatgcctgatttgcccgagtttttgaaggatactgttgatggtggaggtgagtagggttgagggagttggaggaggagaagcggcagcgccgcaattttgagaaggcttccctgatactgttgtttttgtcgcttgtgttgttggcggtggttgctgggggtgctttacgtttcggtgctgtggcttcccagcgggattcggagcaggcgagggcccagtcgaatggtacggcggctaaagggttggctagccgtgtgcggcaggtgtgtgcctctggcgggcaggagtcggtgcgtcttcaccggtctggtttgtgtgtggatgctcagcgtgttgagcgtagcgtgcagggtgtgccgggtcctgctggtgtgcgcggcccgcaaggccctgcaggtgctgacggccgggatggtgttaatggttcggctgggctggttggccctgttggtccgcaggggtccccgggtttgaatggtgtgaagggtcctgacgggctgcccggtgctaacggcaaggatggtgttgccggtgtgaacggggctgatggccgggatggcgtgccaggtagggatggcgctgatggggctgatggtggccgtggccctgccggtccccctggtgtagccggtgcacagggtgagcgtggccctattggccctcagggtccgcagggttctgccggtgccgatggcacgaatggtcgggacggcaaggatggtaaggatgggcgctcggtgatatcggtgtactgttccgggggccgcctggttgtgaaatatagtgacggtacggcctctaccatagcgggttcggtggcctgccagggtgtgaaaccatcaccggtggttaccgtatcatcccacaagtaaaagaggaagggtgttactagtgttgatggtagtgtttgggggtggcgtgttgtgagatacattccagcggcgcatcactcggccggatcgaataagccggtgaaccgtgttgtgattcatgcgacgtgcccggatgtggggtttccgtctgcttcccgtaaggggcgggcggtgtccacggcgaactattttgcttccccatcgtcgggtggttctgcccattatgtgtgtgatgttggggagacggtgcagtgcttgtctgagtctacgattgggtggcatgccccgccgaatccgcatagtttgggtatagagatttgcgcggatgggggttcgcacgcctcgtttcgggtgccggggcatgcttacactcgtgagcagtggcttgatccgcgggtgtggcccgctgtggagcgtgccgctatcctgtgtcggcagttgtgtgacaagcatggtgttccgaagaggaaactgtctgtggccgatttgaaggctggcaggcggggcatctgcgggcatgtggatgttacggatgcgtggcatcagtcggatcatgatgatccggggccgtggtttccgtgggacaaatttatggctgtggtgaatggccacggcggcggttcaagtagtgaggagttaacggtggctgatgtgaaagcgttacatgatcagattaaacaattgtctgctcagcttagtggttcggtgaataagctgcatcacgatgttggtgtggttcaggttcagaatggtgatttgggtaagcgtgttgatgccttgtcgtgggtgaagaatcctgtgacggggaagctgtggcgcagcaaggatgctttgtggagtgtctggtattacgtgctggagtgtcgtagccgtattgacaggctcgagtctactattaacggtttgaaaaagtgatggtggtgtgttgtgggtaaacagttttggttaggtttactggagcgggcggctaagacttttgtgcaaacgtttgttgcggtgttgggggtgacggcgggtgtcacgtatactgcggagtcgtttcgtggtttgccgtgggagtctgccctgattacggctacggttgctgcggtgttgtcggtggctacttcgtttggtagcccgtcgtttgtggctggtaaacctaaaactacggttgtggatgcgggtttggttccaccggatgatgggggcttggttgagccgcacatggttgatgtgtcggatcctggcatgatcgagccgacggatgatgcggatcttggtgtaggctatgagccgaaacacgctgccgagtctgaggttggcacggtagagtctactgttgcataagtgaatatagatgtgtgccccagcggtgctgccacgatctgtggtggttgccgctggggcactctttttgtgtctatagtattttatgattcgttgttgttgatggtttcttcgagcatctggtgcaggtgtaggcaggcggagatcgttttgttggcctggtctagaacgttccggccgataacgtttttgttgttgtcgcggtggcagatgattgactgcatgatctcgtcggccgccgattgtagtagttttgcctggtatgcgattccggcgagccagtctatggcttccgggcttgcccgtgtgtcgtctggaatgccacgggtgttgctgttgtttgggtatcctgcactgtcgcagtcccacaaaatttcgctgcactcgtctagcgtgtcctggtcgatagcaaggttgtcgaggctgacttctttgacggtaaggttcacgttgtcgagtgagatgggtacacggtactggttttcgacactgtcaacaatgttttgcagctggttcatgttggtgggctgttgttggatgattcggtgtaccgctgttttgagggcggtgtgggggatattgtgtgtgttgttcatggtttttatcccattcctgtgctgtcgtcgctatcgtctgggtagtatctactgtttgcgtatcctgtgagggtgatcagtgtttggtctgcccactgtttcaccgtctgtctagtcacacccaatcgttgggcggccgacgcatatgtttgatcgtacccgtagacttcccggaatgcggccaggcgtgccaaatgttttcgctgtttggatggctggcaggtgagggtgtagtcgtcgatggctagctgcaaatcgatcatggtaacgatgttgttgccgtggtgttgtggcgcggttggtgggggtggcatgcccggctccactgatggtttccatgggcctccgttccagatccattgtgcggcttggatgatgtcggcggtggtgtaggttcggttcatgtgtcatcccctgaataggttgtcgaggttgtctgggttgctggtgttggtggtgtcgaatcgtcccacacagtggcagtagtcgtacatgagtttaataatgtgttgatggtctcccaaataggtgtttccgctgatgctgtaggtggctgtgccgtctttactgatggtgtatttggcggtgatggtttcgggtgtttctgtgttggtgatgatggcggtggtggtggagcctacggtttgtagcctggtggtttgggtgccgtcgtcgagtatggtggtgaccattatgattctccttagttgctggtttggttgtcggctagatgaatgatatcgggtaaaggtttcggctggtctaggtgttgtatggttttgttggctagccgtttggctaccctgtagcacattttggtgtagtgtttgttgtctagtttgtggtattgttcccgcaccgcaatatatagcaaagagtcttggtacaggtcgtctgcactgattgcggggtagtgtccggctgttttggtgcatgcccggttgagtgtgcgtagatgatggtctgtggcccacacccacgatgcggtggtggctaggtcggcttttgttggtcgtcggctcatagcatctctttcatctggctatctgatagttgtttggtgttttgttgttgatagtgtagcacacgagtccggggtttccggtggtgcccgtcttgtgccggtaccatgtggattcgccttccatggatgggcattggatgaaggtgcgttgtccttgctcggagatttctaggtggtgccggtgcccggccatcaggatgtgggatgtggtgccgttgtggaattcttgtccgcgccaccattcgtagtgtttgccggtgcgccattggtgcccgtgggcgtgcagtatttgtgtgcctgccacgtcgacggtggtggtcatttcgtctcggctggggaagtggaagtgaaggttggggtattggttgttgagctggtaggcttctgcgatggcgcggcagcagtccacgtcgaaggagtcgtcgtaggtggtgactcctttgccgaagcgtacggcttctccgtggttgccggggatggatgtgatggtgacgttggcgcagtggtcgaattggtggatgagttgcatcatggccatgcgggtgagcctgatttgttccgtcaatggtgtttgtgtgcgccaggcgttgttgccgccttgtgacacgtatccttcgatcatgtcgccgaggaaggcgatgtggactcgttgcggtttgcctgcctgttgccagtagtgttttgcgacgatgagggtgtgtaggtagttgtcggcgaagtgtgctgtttctccgccggggatgcctttgccgatttggaagtcgcctgccccgatgacgaaggccgcagtgctgtagtcggtgtgggtgttgttggctggttttgggggtgtccattcggctagtttgttgacgagttcgtctacggggtaggggtttgttgcgggttggtggtcaataattttttgtatggatcggccggtttctccgttgggtaaggtccattcggagatgcgtgtgcggcgcacggtgccgttggctagattgtcgtcgatggtgtcgatggcgttgtcgtggttggctagttgtgtgagtagccggtctatattgtctatcactggttttcctcttctgtttgtggggtggtgttggcttgtttgcggcggtagtctttgatgacggtggcggagatggggtatccggcttgggtgagcatttgggctagctgtgtggcggggatggttttgtcggcgaggacgtctgcggctttgcggccgtagcgttggataagggtttcagttttggttgccatggtgtcctaggggttgtgtggtgggctgccatcctgtgcggcagtcgccgtcgtgtcctggtttgcgtgtgcaccatgagacttcgccggcattgtggatgatggcacggccgcatatgacgtcatgtaggtgttcgggaaacttatcgttgttgttgtccccgtacatgtcgatcaagtgttgggttttagtaaccatcatgtctcctatgtgtgaaagagtgtgcacatattgtgctggtgtcatggatgtttatgcgggtatggttttcatcaccttgctgaacgttacttggttactgtacatcatctgggtgatttcctgatccgttttgtcggggtgctgttttcgcaggtttgcccattggcaggcgttgtcggtttcttgctggagccgggtgagattgttttcggtgatgatttgtttccacattgtccacgagacgtcgagtcgtttgagcatgtcgatggctggcacgttgaaggagttgaggaagagtatttcctccgtgtagtagtctttttcgtattggtcccatccgcttcggtgcctgttgggctggtttttggggtaggcttcccggcatactttgtgcaaacgtttggccatgtctttgggtagcctaatgtcggggttggcgcggatcatggatcgcatcccatcataggtggtgccccaggtgtgcatgatatgtagtgggtcttcaccatcagcccatttttctgcacagatggcgaggcggatacgcctcctagtggccttactcgtgtcgcggcggccggggatggggcatgtgtcgagggggtccatgatgctttttatgcctttctttgttggggttgcttgtgtggttttattgtagcactgtgtctagtgcttgtgtcaaccctgtttttccggcctgcagataggtgtctgtgacatcccccagggtgaggggcacgtgtatggcttgggggagtgctgcctggatggtttgggccatctggtctcctgctttgtcggggtcggaccagatgtagatgcggtcgtagccttcaaaaaatttggtccagaaagtttgccacgaggtggccccgggtagggctacggccgaccatccgcattgttcgaggatcatggagtcgaattcgccttcgcaaatgtgcatttcggctgccgggttggccatggcggccatgttgtagatggagcctgtgtcccctgccggggttagatatttggggtggttgtgggttttgcaatcatgctggagtgagcagcggaaacgcatttttcgtatttcggctgggccgtcccagacggggtacatgtaggggatggtgatgcactggttgtagtcttcgtggccggggatggggtcattgtcgatgtatccaaggtggtggagccgggctgtttcttcgctgatgcctcttgccgagagcaggtcgagtatgttttcgaggtgggtttcgtagagggctgaggctttctggattcggcggcgttccgcaatgttgtagggttgtaggctgtcgtacattcgggttttctttctctaattgttgtttcagtttgtggagtcctcctccgatgccgcatgtgtggcagtaccatacgcccttgtcgaggttgatgctcatggagggctggtggtcgtcgtggaacgggcagaggatgtgttgctcgttcctggacgggttgtaccgtatctggtaggtgtcgaggaggcggcaggtgtcagaggtgtgggaggagctcgttgagggttgataccacataggcttcgctccatggcttgttgcgctgtttcatcactacgagtccgatggtggaattgttttgtttgtttcggtgtgtttcgtagttgcgtgcctcccggctggcttgtttcacgaattcggcgaggtgtgcctgtcctgctttggcttctatcacataggttttgtggccggttgtgaggatgaggtcgccttcgtcttcgcggccgttgaggtggaggcgctctatatcatagccggtgtcgcgtagctggtggaggagtcgtgtttcccattctgcgccggcccggcggttgcgtgactgttgtgtcgacatgatagtcctttgtggtgttcggtcatgttccatggctgtttttcggcgagtggcccgaagaatgtgtattcggggtaggctctgagtctttcgtatcgtgttccgtctgggctggatttgcctgtgcgctgtttgagtacggcgatgcgtgcctcggcggggatggtgagcccgttgccgttatcctcgccaccatacagggagactcccaatatgagttgtggtttttctgagagtccgtttttgatttcccgcctagccggggggtgttcgatgtcggagccggttttgtcggttgcgtggtgggtgacaataatggtggagccagtatctctacctaatgctgtgatccattgcatggcttcttgctgggcctgatagtcactttcgcagtcttgtatgtccatcaagttgtcgataacaatgagtggtgggaaggtgttccacatttccatgtaggcttgcagttccatggtgatgtctgtccatgtgatgggtgactggaatgagaatgtgatgtgttggccgtggtggatgctgtctcgatagtattctggcccgtagtcgtcgatgttttgttgtatctgggcggtggtgtgttgggtgttgagtgagatgattcgtgtggaggcctcccagggtgtcatgtcccctgatatgtagagggcgggctggttgagcatggcggtgatgaacatggctagcccggatttttggctgccggaccgccccgcgatcatgacgagatcccctttgtgaatgtgcatgtccagattgtcatacaagggtgctagttggggtatgcggggcagttcggcggctgtttgggaggctctctcgaaggatcgttggagagagagcatcggagcctttatctatctgtctatcggttggatgatgttttggtggtcagatggagtcgatgtcgatgtcagcatcagcaggggctgtggtgtcgtctagctggccggtgtcgcgtttgtctacgtattcggcaaccttatcgtagatggcgtcgtctaatggtttgagcacgaccgcgttgaacccgtttttggtgcgcacggtggcgagtttgaaggcctgctcctcgccaaggtaggcttctaggtcgcggatcatggagtgtgggcggtcgttgttgccgcgcgctttctcgataatggcgttggggatggtttctggggtgccgttgttgagatcctggagggtgtggaagattgtgacatcagcgtagatgcggtctgcggtctgtccgccgtagccttcggtgttgtgctggacgtcgcggattttgaaggcgatggcggtggcgtcctggtttcgggaggggttgaagaaggtgctgttgctgttgttgcggtagttggcgagtcccattgttgtttcctttactgttgtgtctgttattgttggtttatagcggtttttatcgggtgaggctgtttcgtttgctgcggaaagcctcagacacgtcagggttactagtgatgatctttttgtactgttttagaaggtcggctagctgtgctttgctggtggcattgttgattttgtcgatgatggtgttgtttccttctgatgcaatgttgtctacgtagtctttggctgcctggttgtatcggtcttggaggatgatggatgctgtggcgatcagtgttgccaggtcccagttccttgccgcggagctgtttttgagtccgccgaggaggtcgatgatagtcttctttacctggtcggcggtgtctccgcggatgacggtccatggggcggcgtagtcgcctccgtatttgagtgtgacggtgaatcggtcgtcgtctgtgttgtcggtcactggtgttccttgccttcttgcgttggggctgtgatggtggtttctatagggtacctgtaggcgtctttcccgttgacagcccagcaggcgtccttgacggggcatcctttacagagtgctgtgacgtggggtacgaagatgccttcactgattcctttcattgcttgactgtacatggatgatacatgccggtaggtgttgttgtcaaggtcatagagttcggttgctgtgccttgtgtcggggacttgtcgtcgttgcggctggtggcgggtgtccaaaacatgcctttcgtcacatggatgccgtgttgggcgagcatgtaccggtatgtgtgcagctgcatactgtcgacgggtaggcgtcctgttttgaggtccaaaatgaaggtttcgccggtgtcggtgtcggtgaatacccggtcgatgtagccgacaatctgggtgccgtcgtcgagggtggtttctaccgggtattcgatgcccggtttaccgtccaggattgcggtgatgtattctgggtggttgtgcctccatgttttccacctgtccacaaaggtggggccgtatatcatccaccaattgtagtcttttttgtgtggcccgcctgactcgcacatgtttttgcatattctgccggagggtttgatttcggtgccttcggattcggcgagggcgatttgggtgtcgaaaatgtttttgaaggatgcgagtttgtctggcagttcagggtattctgcgggattgtacaggtgtaggtcgtattgttcggtgatgtggtgtatggcgcttccggcgatggtggcgtaccaggtgtggtgttgggcatggtagccgtgtgagagccgccatttttctccgcattcggcccactgggtgagtgaactgtaggagatgtggcctggatgttcgatggttttcggatattgtgctagaggcattacttgtcgcttttattccatgggttgcgggtgtcttggccggcatcgtgttgctggtatgcgaggagtgcgaggcagtgccaggcggcatgggccagatgcggcaaatgtgattcgtggtcgaggttgttgccttgctgccatgatagtaggtgccggtagagggcgtcgacactgtggctccacgggtagccgccggtccagttgttgtcgccgtatttggtggcaccgtatcctgccacggagcctagttcgtgcaaggctgtagggtcgatgagggagagcctgcaaagtttgagttctttcttggcgccagtatcagggtcggtgtacatgctggtgggctcatccatggtgtgtgtgctccttacgtgtggggttactggttggggttgtgggcgagtgctacggcgagaataatgatggcgagggtttcagcgatcaggattggtgttgtgatcatttagtgtctcggggattgttggtgagggtggatgcgcctaggagggtggtgagggcgcatgcggcgatgatggcgagggctgccttgtgtggggtgcctgttgcgtacatccatgtgatgatgccgccttgaatccaggctagtgtggtgaagaacgtttcgtagctgtgtagctcaatagtgttgttgggtgtgttcatgcttgctcctgaagaatggtgttgatggttttgtaaatgttgtacaggtcggcttcgatagataacagttggtggatttcgtggtcgaggttgatgtctgggttgagggtgttgatgcgggaggcgatgtcggtggctgtgcgtagtgtgccgccggtgtggtgaataatgtgtgccgtgtcggcgagtccggtggtgacagcgtagtgggagaggagaggcatagcggggatgctccttggcgggttactgttgcgggttgatgttgaggtcggtgacgtgcggtgagttttctgttccggtggcgaggcagtggacggtgacggggagtttggatgctccaggctggcggacggttgcgccgtagacgatagtaaaggtgtctttgtgggcgccgattactttgtggagttggaggtcgatgtcggggttgccgttccatttgacaccctgtgcggcggcttgctgttcggctttgcggttgcaggcgtgtgccgcggtgatcatggtcagccctttgctggtttcttcaccctgtgtttgggcttgccggtgggttttctgctgttcggctcgcagtgactgttctgcggcggcctgcttggcttttttttcggctttgcgctgttggacggtttcaggtgtccattcggtgttggctgtggtggcttgtggggcgggttgtgaggcgagtggcggattgtcgccgggagctggcatgaaggatgctgcggcgatgatggcgactgtggcgccggcgatggtgtagcctgttttcttgttcatggctttgtgttcccctttccggggtgttgttcgttgctgacatggttaatactttcagcggctgggcccactgtcaaggtgtcgctcagtttgtgtgagcgatacttgtgtggctaggggtgatggcttctttcgcccaataggatgtgccaccgctggtccagtatccgagtttgttgcgctgcatgcccttggcgtccatctcgtccacggtgaggcacctgcggcgattggggcctgtcttgaccccgtgatcgcctacccggtgcatgtcgcctgaggtggtactcgtgaatgtttcgtggcagattgtgcagtgatctggtcggtatccgatgattgtgctatcgcacttgtggcatgtccattgcatgattgctcctattttccattataagacttcctgtagtgccattttagcgccttgcaagtcttgggggtacaactatataggtcaggtatttctaggcgattctaggctcattgtgtgtggttggggttttatcgggcgcatagggtgaggaggtggccaacattgatgcgggtcacgttccagtagagttgtgtggcctcatccgcggtgagcggcttccactcgtcgtggctgaacacggtgccgtcggtggcgatgaatgtgttggggcgtagcttgtggagttcggcttccacatgctgccggtaggcttcggcgaggccctcaaaatccatgtggtcgcaggggaggttttcgaggcgtgtcaggtcgaaaggctccgggcagtcgtagctggctgggctgtagagctgggtgaagtggttggcgatcttttgcatgatgatgtcctttttgttgctgataacgttattgagggtttatcgggtggatgctttgaggatggcgtctacatcgatcatgtcgatgagatcgtggagttcctcggcctcgttctcggagaggtggcgccagccgggtggcccgtatagggcgccgtcgagggtgaccgtccacaggggccggatgagtcgtatggcttcttgtactttagcgtggtacatgcggcgcaccatatccagatcgatgtcgtctgaatggtttccggtgaggctgtggaggctgagcgggtcgatttctgtctgcctgtagagggatgtgaaggatggggtgatgagtgtgccatccatgagtgatgttcctttcgatggttgtgggggttgttgtggtttctagagtgtgcgggctgcgactccatagtcaaggtggcgctcaaacccagtgagcgtttcatatgggtgtggcatggaatctacacccccatactgtgtgagatgtatcacattctcctggcttgatgtgcaccctcgaggctactctgccgatctagcgtggaggatgtagcccagaaataccgtttaaagctgtgacatggcgcctaggagcgccttgcagggtgggggctaggtgtttatacccccaagcaattctgatcgattctagacgccccccagagcccgatacacgatcaaccatctcggcatagaccatcagcccctatcctggttagctaagcctcaactatgtggacagtgtgggatactgtggggggaagaaggacacggtacaagaaagagggggagcatcagccttaaggtcttagcactgatggacttagcaccgagcccctcaagggctcggcatcagcccgaacaggcacagccctgaaaggagtacacgccatcagggaaggcttgagagtacgaggagccctagcgacgagtactcgaaagcctgagggaacaccttcagcactgatgggcctagcgtgttcggaaaggacacaagagtcaagtgtgacagctgtccgggagtgaaacccgttctgactaggggtttcagcctgaaccaccctcaaaggttacaagactctaagaaaatttaaggaaaagtttaggtttaatttttggacctttactaccaaaaacacccgtttacacccatcaaacccgcctatagagccaaaaccaccagtttgactcatcccaggtggggtatgataggctggacaggtagccagctggacgcaaggccggaaagtgctaacgcacttcccaacctcgcttaccatcagtctaccaaacacttaaagacctaagggcttagcgctaaggtactgatagcttagcaccgagcccctcaagggctcggcatcagccttaaagccttaaacactttaagtaactttaaaaccttcaaggcttagcacttaaggatataagttactattaaagctttaagagcttaacacgtaaggttataaataaacattaaagctttaaagtcttaaagtaaatataaaaccttaacagttaaacgttaaaagctttaaaccttaacacctaagttaagtataaaaccttcaaggcttagcacttaaggatataaacttaacatcagtgtttaagacttaaaaacttaaagtaactataagactttaaagactttaagtacttaaagttaaccatcagtcttaaactttaatattataacctataagtcttaaagcttataggtataaaagtttttagaagagttaaagggttaacttctttacttctcttctctctttggttctttctctcttctcttgttttcttcatcaggggagaagaggaacctttaacgtcaacgctgatggacttttcaccgtgtgtctcgtgtgcttctggtcgcaagctcccatcgcacactccccacacttactctacccgtgtccctttcaggcttagcgtgttcggctgaaggcgtacggcgtgtcacgcttaaacccttaacaccaggtaagacttaaagtgtatattataagtagaagactttaaaaccttaagggtgttcccgctgagcctgtgtccttcaacgctaggcgctaggcgctaagctgtgaaacgtgaacacccatccaccccctttttttctttcgtgtccttattcttttgacaccgctggggggcgatgtgatatttttcacatgccaggggttaggagaagaaaacaaccaccccggcacaaacagaacaccccctcaaacaaacaaaacggggcctaggatcgaacagcagggcaccggtagagtattcctacccctaacgattcccaggccgttacaggagcaatgagagcccatagaggcgtggtagacgatagggggcgtgatggcacacaccaaccgcaccgcatcatcagcccaccggcgctggcgggcaaggctcatcacccaagcacgcaagcaaggccaaaccgaatgcccactctgcggagcccagatagcctggggcacacaccagctcccaaccagccccgaagccgaccacatcacacccgtcagccgaggaggactcaacaccctcgacaacgggcaaatcatctgcagaacatgcaacagaagcaaaggcaatcgcagcgaaccaaacattagttttcaacaacaaaccacaaaaacgttgatcccatggtgaaaaaaaccacaaaccccacgggaaccaccccctgcacacccgtgcaagaccaagcacacgagacacacggtgaaaag

SEQ ID NO: 5 - DNA, 29197 bp, Propionibacterium acnes bacteriophage
ccggcccacaccatcaacaatcgttcccgacagcccatcaataacctcaacatgaaccccagcatcagtccggccggcaccagccaaagcaacccgatccccagaacgagaaaacgagacaccaaacactttcccgccaaccagagccgcctcatccacagccgactgagcccacttatccgcaggaaccacagacgcagcagactggccacgatcccaccagccaagccgctccctcgcaaacccggcagcagacatcgactcatgctcatccgacacagtcccaaaattcagacgcctacccaacgccggattagtatccccagcaagcttccgccactgccgcgacacatcatccggatcagactcgtcaggaatcgaaaactccgtccacgcaaaccttttaccaccaccaagcgcctgcccacgaagacgcaacacaaccgaaccatccgccaacggcccaggcggcgtacccaaaaaaatctgctgcggatcaccagacggggcagcacttaccgtaggaagcaaagcctccaactgctcatccgacaactcctgagcctcatcacacaccaaatcatcaaccgtaaaaccgcgagccgaaccacgagaacgggccacaaactcaaccgaaccccaacccggacagccacacttcttctcaaacgtggcacaatccggatgatgcaacacaatagcctcctgaccattcgtcgcacgaatcgacttcaccatacgatacaagtcaggaaactggcgctcattctcaaaaaacgaccgcaaccgcataaacgccttacgagccgacttcaactcgtgagccgtatgcaaaatacggcgaccctgaatagtcgccttaaacaactccacaacctcaaggatcgcattcttgccattctgccgcggaacaaacaccccacacacacccgaagcaagcctgccattaccaccgacagccagccaatcatccaacacctgctgctgccacggatccggagtcaacccatacgcacgacccaactccccagcatcaccgccagcagacaccgaatacgccgcagccacacgatgacgaggaacctgagacccaacaacaccagacacctaatcaggcccccctgcgcttcctataccggtcaatcatcgccaccgcagaacccccaccacggccaccagacaccacatcaaccgaataacgatccaacatacccataaaagccttcacatgagcacgaagcgaagccaccaaatccgcgcgaccctcacgccacacacaatcatgaatcaccgcagcatccatgagaaacagccactcctcatcagacacgtactgcgcgcgactatcctcaccccacacacgccaccaacgacgcgtctccccacaccactcacgactatcaggaagctcaggctgcacaacactcaccaccaacacaaaaagtcgacaaacagacaaaaccacaaaagggaggtatttcactaagccgtacgtggtcttgcacgggtgtgcagggggtggttcccgtggggtttgtgggtttttcaccatgggatcaaggtttttgtggtttgttgttggaaactaatgtttggttcgctgcgattacctttgcttctgttgcatgttctgcagatgatttgcccgttgtcgagggtgttgagtcctcccctgctgacgggtgtgatgtggtcggcttcggggctggttggcaggtcatgtgtgttccaggtgatggttgctccgcagagtgggcattcggtttggccttgccgttgggcttgggtgatgagtcttgcccgccagcgccggtgggcttggctggctgtgcggttggtgtgtgccatcgcgtcccctgatctcctatggcccctgtgagtctcttattgctcctgtaacggcatagaaactgttgggggtatgaatactctaccggtgccctgctgttcgattctgggccctgttttgtgcgtttagggggtgttctgtttgtgccggggtgtttgttttctccactaccacctggcatgtgaaaaatatcacatcgccccccagcggtgtcaaaaaagagaaggacacggaagaaaaagggggtggatgggtgttcgcacttcaaggcttggcgcctagcgttgaaggacacaggctcagcgggaacaccttaaaggttttaaagtcttctacttataatatgtactttaagtcttacctggtgttaagggtttaagcgtgacacgccgtacgccttcagccgaacacgctaagcctgaaagggacacgggtgtcagggtgtggggagtgtgcgatgggagcttgcgaccagaagcacacgagacacacggcgaaaagtccatcagcgttgacggttaaaggttcctcttctcccctgatgaagaaaagaagagaagagagaaagaaccaaagagagaagagaagtaaagaagttaaccctttaactcttctaaaaacttttataacttataagctttaatacttatattatattattatacctataagctttaagacttataggttatcatagtaaagtttaagactgatggttaactttaagtacttaagttctttaaggtcttatagttactttaactctttaagtattaaacactgatgttaagtttatatccttacgtgctaagcttttaaggctttatacttaacttaggtgttaaacgtttaactgttaaggttatatatttactttaagactttaaagctttaatgtttatttataactttaagtgttaagcttttaaagcttttatagtaactttagatccttaagggctaagcctttaaggttttaaagttacttaaagtgtttaagactttaagactgatgccgagcccttgagggggctcggtgctaagcgttaaggtcttaagggcttagcgctaagccttgaagctttaaagtgtttggtagactgatggtaagcgaggtcgggaagtgcgtcagcactttctggccttgcgtccagctggctacctgtccagcctatcataccccacctgggatgagtcaaactggtggatttggctctataggcgggtttgaggggtgtaaacgggtgtttttggtagtaaaggtccaaaaattaaacctaaacttttccttaaattttcttagagtcttgtaacctttgagggtggttaaggctgaaacccctagtcagaacgggtttcactcccggacagctgtcacacttcactcttgtgtcctttccgaatacgctaggcccatcagtgctgagggtgttccctcaggctttcgagtactcgtcgctagggctcctcgtactctcaagccttccctgatgacgtgtacccttttcagggctgtgcctgatgaggctgatgccgagccccctcaagggctcggtgctaactgctaagaccatcggtgctaagcgctaagaccttaaggcttgaaggctgatgcttccccctctttcttttactgtgtccttcttccctcttagcatccagcactgtccacatagttgaggcttagctaaccaggataggggctgatgatctatgctgagatggttgatcgtgtatcgggctcctggaggcgtctagaatcgatcagaattgcttgggggtataaatacctagcccccaccctgcaaggcgctcctaggcgtaccccagaagctttaaacggcatttctgggctacaccctccacgctagatgcggcagagtagcctcgagagggcacaccaagccaggaggatgtagcctatctcacacagtatgggtgtagattccatgccacacccatactgaaacgctcactgggtttgagcgccaccttgactataggtcgcaacctacacactctagaaaccacaacaacccccacaaccaccgaaaggagcacacccatggatggcacactcatcacaccatcattcaccagcctctacgggcagacagaaatcaacccactccaccccacacacctggcaggatgtgacataggcaacacccacacgtctatcatctgccgcctgcaccgtgccaaagtcgaggaagccgtccggctcatccgacccctgtggactgtcaccctcgacggtgccatatacggaccccaggactggcagccactcaccgcggatgaggctgatgaactccacgacatgatcgacacgatcgacgtcgacgccatcatcgccgaagccacacgataaaaaccatccacacaccagaaaggaacccgccatgcagaagatcgccaaccacttcacccagctctacacccccgccagctacgactgccccacacccttcgacctgacacgcctcgaaaacctctcctgcgaccacatggattttgagggcctcgccgaagcctaccggcagagcgtggaagccgaactccacaagctgcgccccaacacattcatcgcatccgatggcaccgtgttcagccacaacgagtggaagccactcaccgggggtgaagccacgcaactctactggaatgtgagccgcatcaatgttggccacctcctcaccctgtacagccgataaaacccctagccacacacgaatcgctcacaatcgttgagcgcagccttgacacgaggtccagtcactggaagtattgatcatgtcagcaacgaacaacaccccggaaaggggacaacagtcatgaacaagaaaacaggctacaccatcgccggcgccactctagccatcatcgccgcagcatccttcctgccagcaccagacgacaacccgccactcgcctcacagccagccccacaggcaaccacagccaacaccgaatggacccccaagactacccaacagcgcaaagccgagaaagcggcacggcaggcagccgccacccgatccctacaagccgaacagcagaaagcccacaagcaagcccaagcaaggggtgaagaaacctcacaaggtctcaccatgatcaccgcggcacacaactgcaaccgcaaagccgaacagcaagccgccgcacacggtgtcaaatggaacggcaaccccgacatcgacctccaactccacaaaattattggcaaagacaccttctccatcgtctacggcgccaccgtccgccagccgggagcatccaaactacccgtcaccgtccactgcctcgtcaccggaacagaagaccacccgcacgtcaccgacctcaacatcaacccgcaacagtaacccgccaaggagcatcccagctatgcctctcctatcccactacgctgtcaccaccggactcgccgacacggcacacatcattcaccacaccggcggcacactacgcacagccaccgatattgcctcccgcatcaacaccctcaacccagacattgatctcgaccacgaaatccaccaactgttatctatcgaaaccgacctgtacaacatttataaaaccatcaacaccattcttcaggagcaagcatgaacacactcaacaacaatattgagctacacagctacgaaacattcttcaccacactggcctggatccaaggcgccatcatcacatggatgtacgcaaccggcaccccacacaaggcagccctcgccatcatcgccgcatgcgccctcactatcctcctaggtgcctcaaccctcaccaacaatccccgagacaccaaatgatcacaacacccatcctcatcgcagaaaccctcgccatcatcattctcgccgtcgccctagcccacaaccccaaccagtaacccacactcaaggagcacacacaccatggataagcccacccgcatgtacaccgaccctgatactggtgcccgaaaagaattgaaactttgcaggctatccctcatcgaccctacagccttgcacgccctcggctccgtggcaggctacggcgccaccaaatacggcgacaacaactggaccggcggctacccgtggagccacagtgtcgacgccctctacaggcacctgctatcatggcagcaaggaaacaacctcgatgatgaatccgggctaccccacctggcccatgctgcctggcactgcctcgcactcctcgcctaccagcaacacgatgccggggtagacacccgcaacccatggaacacccacaaaggcgacaagtaatgcctctagcacaatacccgaaaaccatccaccatccaggccacatatcttacagttcactcacacagtgggccgaatgcggagaaaaatggcgcctatcccacggctaccacaccaaacaccacacctggtacgccaccatcgccggaagcgccatacaccacatcaccgaacaatacgacctacacctgtacaatcccgacgaataccctgcactgccagacaaactctcatccttcacaaacattttcgacacccaagtcgccctcgctgaatccgaaggcacagaaatcaaaccctccggcagggtgtgcaaaaacatgtgcgagtcgggcgggccacacaagaaagactacaattggtggatgatatacggccccacctttgtggaccgctggaaaacatggaggcgcaaccacccagaatacatcaccgctgttattgacggccagccaggcatcgaatacccggtagaaaccaccctccaggacggcacccagattgttggctacatcgaccgcgttttcaccgacaccgacaccggcgaaaccttcattttggacctcaaaaccggccgtctacccgccgacagtatgcagctgcacacataccggtacatgctcgcccaacacggcaacgatgtgacgaaaggcatgttttggacacccgccaccaccaagggagacgagcaatcggtcgaacagggcacatccaccgaactctacgatcttgacaataacacctaccggcatgtatcatccatgtacagtcaagcaatgaaaggaatcagccaaggcatcttcgtaccccacgtcacagcactctgcaaaggctgccccgtcaaggacgcctgctgggctgttaacgggaaagacgcctacaggtaccctatagaaaccaccatcacagccccaacaaaagaaggcaaggaataccagtgaccgacaacacagacgacgaccgattcaccgtcacactcaaatacggaggcgactacgccgccccatggaccgtcatccgcggagacaccgccgaccaggtaaagaagactatcatcgacctgctaggcggactcaaaaacagctccgcggcacggaactgggacctggcaacactgatcgccacagcatccatcatcctccaagatcgctacaatcaggccgccaaagactacgtagacaacatcgcctcagaaggaaacaacaccatcatcgacaaaattaacaatgccacaagcaaggcacagctagccgacctcctcaaacagtacaagaagatcatcactagtaacagtgacgtgtctgaggctttccgcagcaaacgaaacagcctcacccgataaaaaccgacacaaaccaacaaacaaaacaacacaaacagtaaaggaaacaacaatgggactcgcaaactaccacaacaacagcaacagcaccttcttcaacccgtcccgaaaccaggacgccaccgccatcgccttcaaaatccacgacgtccagcacaacactgaaggctacggtggacagaccgccgatcgcatctacgctgatgtcacaatcttccacaccctagacgatctcaacaacggcaccccagaaaccatccccaacgccattatcgagaaagcccgcggcaacaacgaccgcccacactccatgatccgcgacctagaagcctaccttggcgaagaacaggcattcaaactcgccaccgtgcgcaccaaaaacggcttcaacgcggtcgtgctcaaaccccttgatgacgccatctacgataaggttgccgaatacgtagacaaacgcgacaccggccagctagacgacaccacagcccctgctgatgctgacatcgacatcgactccatctgaccaccaaaacaacatccaaccgatagacagatagattaaggctccgatgctctctctccaacgatccttcgagagagcctcccaaacagccgccgaactgccccgcataccccaactagcacccttgtatgacaatctggacatgcacattcacaaaggggatttggtcatgatcgcggggcggtccggcagccaaaaatccgggctagccatgttcatcacagcgatgctcaaccagcccgccctctacatatcaggggacatgacaccctgggaggcctccacacgaatcatctcactcaacacccaacacaccaccgcccagatacaacaaaacattgacaactacgggccagaatactatcgagacagcatccaccacggccaacacatcaccttctcattccagtcacccatcacatggacagacatcaccatggaactgcaagcctacatggaaatgtggaacaccttcccacccatcatcgttatcgacaacctgatggacatccaagactgcgagagtgactatcaggcccagcaagaagccatgcaatggatcacagcattaggtagggacacgggctccgccattattgtcacccaccacgcaaccgacaaaaccggctcagacatcgaacaccccccggctaggcgggaaatcaaaaacggcctctcagaaaaaccacaactcatattgggagtctccctgtatggtggcgaagataacggcaacgggctcacgataccggccgaggcacgcatcgccgtactcaaacagcgcacaggcaaatccagcccagacggaacccgatacgaaagactcagagcctaccccgaatacacattcttcgggccactcgccgaaaaacagccatggaacatgaccccaacacacaaaggactatcatgtcgacacaacagtcacgcaaccgccgggccggcgcagaatgggaaacacgactcctccaccagctacgagacaccggccatgatatagaacgcctccacctcaacggaagggaagacgaaggcgacctcatcctcacaaccggccataaaacctacattatcgaagcaaaagcaggacaggcacacctcgccgaattcgtgaaacaagccagccgggaggcacgcaactacgaaacacaccgaaacaaacaaaacaattccaccatcggactcgtagtgatgaaacagcgcaacaaaccctggagcgaagcctatgtggtatcaaccctcaacgagctcctcccacacctctgacacccgccgcctcctcgacacctaccagatacgctacaatccttccaggaacgagcaacacatcctctgcccgttccacgacgaccaccagccctccatgagcatcaacctcgacaagggcgtctggtactgccacacatgcggtatcggaggaggactccacaaactgaaacaacaattagagaaagaaaacccgaatgtacgactcactacaaccctacaacattgcggaacgccgccgaatccagaaagcctcagccctctacgaaacccacctcgaaaacatactcgacctgctctcagcaagaggcatcagcgaagaaacagcccgctaccaccaccttggatacatcgacaatgaccccataccaggccacgaagactacaaccagtgcatcaccatcccctacatgtaccccgtctggggggggccagccgaaatacgaaaaatgcgtttccgctgctcactccagcatgattgcaaaacccacaaccaccccaaatatctaaccccggcaggggacacaggctccatctacaacatggccgccatggccaatccggcagccgaaatgcacatttgcgaaggcgaattcgactccatgatcctcgaacaatgcggatggtcggccgtagccctacccggcgcaacctcgtggcaaactttctggaccaaattttttgaaggctacgaccgcatctacatctggtccgacccagacaaagcaggcgaccagatggcacaaaccatccaggcagcactcccccaagccatacacgtgcccctcactgtcggggatgtcacagacacctacctgaaggccggaaaaacagggttgacacaagcactagacactgtgctacaataaaaccagacaaacaaaacatcactccaagaaaggcataaaaagcatcatggaccccctcgacacatgccccatccccggccgccgcgacacgagtaaggccactaggaggcgtatccgcctcgccatctgtgcagaaaaatgggctgatggtgaagacccactccacatcatgcacacctggggcaccacctatgatgggatgcgatccatgatccgcgccaacccagacattaaactacccgacgacatggccaaacgtttacacaaagtatgccgggaagcctaccccaaaaaccagcccaacagacaccgaagcggatgggacgcctacgagaaaaactactacacccacgaaatactcttcctcaaccaattcaacatcccagccctcgaaatcctcaaccggctcgacgtgtcatggacaatgtggaaacacatcatcaacgaacaacacctgacacgtttacagcaggaaaccgacaacgcctgccaatgggcaaacctgcgaaaacagcaccccgacaaaacggatcaggaaatcacccagatgatgtacagtaaccaagtaacgttcagcaaggtgatgaaaaccatacccgcataaacatccatgacaccagcatagtatttgcacactctttcacacataggagacatgatggttactaaaacccaacacgtgatcgacatgtacggggacaacaacaacgataagtttcccgaacacctacatgacgtcatatgcggccgtgccatcatccacaatgccggcgaagtctcatggtgcacacgcaaaccaggacacgacggcgactgccgcacaggatggcagcccaccacacaacccctaggacatcatggcaaccaaaactgaaacccttatccaacgctacggtgataaagccgcagacgtcctcgccgacaggtctatccccgcctcatggctagcaaaacagctcacccaagccggataccccatctccgccaccgtcattaaagactatcgccgcaaacaagccaacaccaccccacaaacagaagaggaaaaccagtgatagacaatatagaccggctactcacacagctagccaaccacaacaacgaagcagacaccatcgacgacaatctagccaatggtactgtacgccgcacacgcatctccgaatggaccttaccgaacggagaaacaggccgatccatacaaaaaataatcgaccaccaacccgcaacaaacccctaccctgtagacgaactcgtcaacaaactagccgaatggacacccccaaaaccagccgacaacacccacaccgactacagcactgcggccttcgtcatcggggcaggcgacttccaaatcggcaaaggcatccccggcggggaaacatcacacttcgccgacgactatttgcactccctcatagtcgcaaaacactactggcaacaggcaggcaaacccgagcgagtccacatcgcattcctcggcgacatgatcgaaggatacgtgtcacaaggaggcaacaatgcctggcgcacacaaacacccttgacggaacaaatcaggctcacccgcatggccatgatgcaactcgtccacatgttcgaccactgcaaaaatgtgaccatcacatccatccccggcaaccacggtgaagccgtgcgcttcggtaaaggcgtcaccacctacgatgactccttcgatgtggactgctgccgcgccatcgcagaagcctaccagctcaacaaccaataccccaacctacacttccacttccccgcacgggacgaaatgaccaccaccgtcgatgtggccggcacacggatactgcacgcccacggacaccaatggcgcaacaaccaacactacgaatggtggcgcggccaagaattccacaacggcaccgtatctaatattctcatggcagggcaccggcaccacctagaaatctccgagcaaggacaacgcaccttcatccaatgcccatccatggaaggcgaatccacatggttccggcaccgcaccggcaccaccggaaaccccggactcgtgtgctacactatcaacaacaaaacaccaaacaactatcagatagccagatgaaagagatgccatgagcagacgaccaaccaaagcagacctagccaccaccgcatcgtgggtgtgggccacaaaccatcatcttcgcacactcaaccgggcatgcaccaaaacagccgcacactaccccgcaatcagtgcagacgacctgtaccaagactccctactatatattgcggtgcgggaacaataccacaacctcgacaacaaacactacaccaaaatgtgctacagggtagccaaacggctagccaacaaaaccatacaacacctagaccaaccgaaacctttatccgatattattcatctagccgacaaccaaaccagcaactaaaagggagaacacacaccatggtcacaaccatcctcgacgacggaacccaaaccaccaggctacaaaccgtaggcgccaccaccacagccatcatcaccaataccgaaacacccgaaaccatcaccgccaaatacaccatctctaaaaacggcacagccacctacagtatcagcggaaacacctacctcggcgaccaccaacacattatcaaactcatgtatgactactgccactgcgtcggacgattcgacaccaccaacaccagcaacccagacaacttcgacaacctattcaggggatgacacatgaaccggacctacaccaccgccgacatcatccaagccgcgcaatggatctggaacggcggcccatggaaaccgagcgtcgagccaggcatgccacccccaccaaccgcaccacaacaccacggcaacaacattgccaccatgatcgatttgcagctagccatcgacgactacaccctcacctgccagccagccaaacagcgaaaacacctagccaggctagccgcattccgtgaagtatacgggtatgatcaaacctattcggtggcagcccaacgactcggggtgacaaggcagacggtgaaacagtgggcagaccaaacactcatcaccctaacaggctacgcaaacagtagatactatccagacgatagcgacgacagcacagggatgaaataaaaccatggacaacacacacaatatcccctacaccgccctcaaaacagcggtacaccgaatcatccaacaacagcctaccaacatgaaccagctagaaaacattgttggaggtgtcgaaaaccagtaccgtgtaccaatctcactcgacaacgtgaaccttaccgtcaaagaagtcagcctcgacgatcttgctatcgaccaggacacgctagacgagtgcggcgaaatcctatggtgctgcgacagtgcaggataccccacaaacaacagcaacacacgggcaagccaggaagccatagactggatggcaggaatcgcataccaaaccaaactactacaatcggcggccgacgatatcatgcggtctatcatctgccaccgcgacaaccacaaaaatgttatcggccagaacgttctgcaccaggccaacgaaacgatctctacctgcctccacctggaccagctgatcgaagaaaccatcaacaacaacgaatcatagaatattatagacacaaaaatagtgccccaacggcaaccaccacacaatcgtggcagcaccgctggggcacacacatattcaattatgcaacagtagactctaccgtgccaacctcagcctcggcagcatgtctcggcacatagccgacaacatccgcatcatcaatcggctcaatcatgccaggatccgacacatccaccgagtgcggctcaaccaagcccccatcatccggtggaaccaaacccgcatccacaggcgtggttttcggcttgccagccacaaacgacgggctaccaaacgatgtagcaaccgacagcaccgcagcaaccgtagctgtgatcaaggcagactcccacggcaaaccacgaaacgactccgcagtatacgtgacacccgcagtcacccccaacaccgcaacaaacgtttgcacaaaagtcttagccgcccgctccagtaaacctaaccaaaactgtttacccacaacaaaccaccatcactttttcaaaccgttaacagcagactcgagcctgtcaatacggctgcgacactccagcacgtaataccagacactccacaaagcatccttagtgcgccacagcttccccgtcaccggattcttcacccacgacagggcatcaacacgtttactcaaatcaccattctgaacctgaaccacaccaacatcgtgatgcagcttattcaccgaaccagtaagctgagcagacaattgtttaatctgattatgtaacgctttcacatcagccaccgttaactcctcactacttgaaccgccgccgtggccattcaccacagccataaatttgtcccacggaaaccacggccccggatcgtcatgatccgactgatgccacgcatccgtcacatcagtatgcccgcagatgccccgcctaccagccttcaaatcggccacagacagtttccttttcggaacaccatgcttgtcacacaactgccggcacagcaccgcggcacgctcaaccgcaggccacacgcgaggatcaagccactgctccctcgtgtaagcatgccccggcacccggaacgaggcgtgcgaaccgccatccgcgcaaatctctatacccaaagaattcggattcggcggggcatgccaaccaatcgtagactcggacaggcactgcaccgtctccccaatatcacacacataatgggcagaaccacccgacgatggggacgcgaaatagttcgccgtggacaccgctcgccccttacgggaagcagacggaaaccccacatccgggcatgtcgcgtgaatcacaacacggttcaccggcttatttgatccggcagagtgatgcgccgctggaatgtatctcacaacacgccacccccaaacactactatcaacactagtaacacccttcctcttttacttgtgggatgatacggtaaccaccggtgatggtttcacaccctggcaggccaccgaacccgctatggtagaggccgtaccgtcactatatttcacaaccaggcggcccccggaacagtacacagacaccaccgagcgcccatccttaccatctttaccgtccttgccatcggcaccggcagaaccctgcggcccctgaggcccaacagggccacgctcaccctgtgcaccggctacaccagggggaccaacagggccacggccaccatcagccccatcagcgccatcagcgccatccctacctggcacgccatcccggccatcagccccgttcacaccggcaacaccatccttgccgttagcaccgggcagcccgtcaggacccttcacaccattcaaacccggggaaccctgcggaccaacagggccaaccagcccagccgaaccattaacaccatcccggccgtcaaccccagccggcccttgcgggccgcgcacaccggccgggccaggcacaccctgcacgctacgctcaacacgctgagcatccacacacaagccagaccggtgaagacgcaccgactcctgcccgccagaggcacacacctgccgcacacggctggccaaccctttagcggctgtaccattcgactgggctttagcctgctccgaatcccgctgggaagccacagcaccgaaacgtaaagcacccccagcaaccaccgccaacagcacaagcgacaggaacaacagtatcagggaagccttctcaaacgagcggcgctgccgcttctcttcctccaactccctcacaattcaccccccaccaccatcaacagtatccttcaaaaactcgggcaaatcaggcatctttacaggctcaacattctccggtagattcgcgttatagcgatgaacaatatggcgaatattccacgtgtactcttccatcgcatcaacctgcgcagacaactgcctaagcctcttcttcgacctgtacgtagccgcctgaatcgaaccaaggatagtagcgatagcggtacaaatagaggctacgagtgtgggtgtaagccatgacactacagccccctaccactacaaccaccacaacatgtcacatacccgcaagccgcgcattacacgccgacagcaatccaattagccaccgcaggcacaccattcggcttcgaaccatcattcgtaataaacgccaactgaaaatccttggcagtaacattgtaggctttcacatcaatctgctgcgtgcccccagccgccgtagccatagacgccaccaccacaggcggactactgaactggcgctcaaacgggatcgtgtaagcatacacagcagacccgccaaactggatctgcttagaacccgtttcgatacgcggagacaacaacatccactcgccggcatgattagcccacacagccccagaaggaaccatcacacggtcaccctccacaggggtagggtcacaagccgcagactcgccaaacgccacacgggccgctatagcacgcctatccaactgctgctgcaacccgttagacgacaccaccaaagtagccaacaactgctgatggtacacgccaggctcagcccttaacacgtcacgggcacgctccgcacggcccccaggaacaatctccaacttggctgtgttctgctcccaatcccgagacaggacaacatagtcgtagcgggtctcaccagggcccggaagctggcccgtcaccgtctcaacactattcgacgtgcacataaccccgtgagcccaagcctgccccggcaaaacactacacaacactgtggcaccctgaacagtagtgccgacacgaaaatcgtccgggcccttcacggacggcatattacccatcagaccagacatttgagcccaatcatactcggtcaacaccccatcaaaacccttgcacacaatacccacaacaaaccccaatcacttactaaaacttttgcaaatcccgcacacccgcagccaaatcagccacacggcgagccaacagggccgacggattatcctcataatcccccgcaataggagtcaccttcgtccacccgtcaccaggcgatacacactccacatcaatctgccgaacaatctccgcaataggccccgagcccacatccacatagatcaaatcacccggcatcagattgcccggcccaaaccgcaacacatccgactcagccaactcgatcttaaaccccgacgtggcccccgactcggacaacacccgctccgcctcatcaataagatgcacatgctcagaatccgtgttacgggcatccttaaacacctcgacacgatcaaaccactcatcctcggccaacgcgtcaaaatcctcacaaaacagtcgatctttgccctcgccgcggccacccacaaccaccgacgtagccttcggggcgtcacgcacatactcccacgacacaatcgaacccgactcggcagtcaacacatggtcacgcgtcacagcaggcacacaatcaaacagtaaaccccgctgatcctgcttcacattctcaaactggttcaccgtgacagtcatccgagcccacgacaacaccggcaacaacttatcggcaaacacgtgaaaccgggcctgaaaatccttaatatagcggccacgactcttatcatccaccataaatatatcagacggaaaacgccaagtattatcccgcaacgccttcttagcgaccgactccgccgcacccgaatagtgggcataatccctattggcacgccactccatcccaatgatgctggaacgataaggcacaggccacaacagcatacgccacaacaggcggatatcatcctcacacgtgatagtcacccgcgaagaacgccaaggacccacaccatgaacccgacgcacaggcccagaaaaaatctggccaccaccataatcaacaaccagccgtgcacccggcctagtcaacccgtcaagcctagaatgatcacccgacaccaccaactccaaagtggacaaaccattccacttcaacgacaacttcaacgactcaaaaaaattgataggcgccacacggcgataatccggcgtaaacaatgttacatgcggaacaagaccagccatcaaccattcaccaagccctcaaaaacctgtactgcaccgacacaacaatggcacccaaaccaaccatctcaatattcacactccgagaaccgccaggcgggataggcgcaaactcccactctgtcaaacgatccatcacatcctcaaacccgttcagcaatgcagactgctggcgaggatccgtgtcaatagtgatccaatcatactcctcgacaggataatccgaagacacacgcaaaccatcaatctgcacagaccacgactccaacgggccctcaacacgaatcacaggccacgcaggcacatcacccttattagacagattatcccagccagagcccacacccggtgttaacaccacaggaaacgccgtgccatccttgccgacagggccgccacccaaccaatcctgcaacttcgcattactaaaacgaaacttttgctcatccccataccaaaacgggtcataggccgtcaaatgaatcacataacgcgcataacccctgttcaccggatcaaccgtaaacgtgtcatccaccgaatcaaaccgacaccgcagcacacgctcacgaccggcaggagtcttcacagacaactccccctcctccccgggaggaaaagcagaccacaactcgtcataggctttcaaaaaaccgtcacgaaacccgcccaccggatccggatccacacccgacaccaacaccggcagcgtcacctcgcgaggcttcacattaaacccgcgccactccgagccgtgcaccccaacatgcgtttgagaaaaatgctccacctcaggaacacccaaaccgcgcaacgaatcattcaacaacatcaccggagacgcacccgtataatccgtcaaatgaagcacacgctcatagccaaaccgcggatccatagaccaggtcacagtcaaaccagaacggtcagacgggtcaggaataaacatgcatacccctttactcacatataagccaacgcgttcaaagcgtcacgctgctgccgctcaatccgcttcgcaaactcggcaggatcaccatacgtcgggccattcacattcaccacaacactcttatcattctcacgccgataccggtcatacggggtaaacgagcccacagacgatcgcacaccaaaccgggcatcaacagcatccggaagctgcgaagcaacacccgacatcgcatccaacgccaaaccagcattaccagtaataccctcagccaaaccggcaacaacctgccggccaacctcgtcacgaaacaccctagacggggaatgaatacccagagcagacttcgcagcattagcaatctgggaacccatgttacgcaccgtatccaacaggccactcatagcattcttaataccgttacccaaaccggcaacaacattatggccagcagacaccaacagggaccccatgttacccagggcgcccctaatattgctgggcagattccggaaaaaacctatcacactatgcacaccactagacacagccgagcccatagcgtgcatagcagaagaagccgcacccctcgcagcgttaaacccggacgaggcagcaccacgaacccgagaagccatcgacccgaaaaatccgccaacagcggacgccaccgaagacacaacactccggatagcattcatcgcagaagaaacagcgccacgagccgcgttaaaaccagacctcacatgggaggcaaccgaagaacccagccgggcaaaaaacccaacaacagcattcacgccgccggaaatcaccgacttgaaaccattaataaacgcagacgtaaacgccctaatatgattccagccagcctgaaccaccgaacccatacgcgccaaaccagacacaaaatgggcaacaacccacgagatgacactggcaacagcggcaataacacgggccacagccgacacgacagcaccaacaatacgggcaacaaacccgaccacggccgccaccatcggagccacaacagcaagaatacgggccaccacctgtatcacaaccgcaacaacctgaaccaccacacgcataacagacatgatgactggtatcaacgaccggatcaggccaataatcggtggcagcacagacatgacagcacccaaaatctgttgaatcacaggcatcaacaccggcaccaactgcatgatcacgccaacaacctgacgtatcacagccacaacagcctgcaacaccggcataagcgcaggcagcaacatggcagcaacctgcgtcaccgcaccaataatctgcgtgatcacaggcacaagctgggcaaccagcatactaaccaaaggcacaagctgcgcagctagcccggcaaccaaaccgataatctggccgaacactggcgccaaccgtgccaccaaaccagcaaccaaacccaacagcggctgcacagcggccatgatctggcccaacgcctggccaaccacagccacaagctgcatcaccgcggcacggaactgggcgttcgtagcaaacatggcagcaaacaagccgatcacaatcccgacagggccacccagggcgcgaaacacgccgccaagccccccagcggcacccttcaaagcaccaaacgacggcaacagattcttcaacgacaccgccaacggggcaaaccctgcaacaagcttccccacaccggcagcaacaataccaaacactgcggtgccgccagcaaacatggcacccaaattcactttagggacaggcaaatgcattctcgcaaaaatgcccttcaactgatcaaccttggcgcgcatctgtgcattcattcgagtgatcatgcccggcatacgattaatccacgccaaaatagacggcatcatccgctgaatcccctgatccaccgacgcaaacatcggcttcacagaatccgtcaccgacttgataaccggattcaacgcaacaaaaatctgccgcaaaccgttaagaaacggcgccatagccgtagcacccaaataacccagggcgcccttaacattcttcatagcgccctcaaacgtcttaccagacgcctgcgcagcaccacccatgccaagcttcatcgcagccgcaaacgtgttaaaatcaatctgccccttcgacaccatctgcgacacctcagcagacgttttacccgtctgcctggcaagcaaagacagcacagggacacccgccatcgtaagctgcaacatgtcatcgccctgcaacttaccgcgagccatcacagacgtaaaaatagcgcccgtatcctgaaacgacttacccgaaatataagacacatcggcgacagtcttcaacacatcagtcatctgcccgccagacttcacacccgaagcagacaacgccgcagccgtagacgccgcatcccccaacgcatacgacgtaccagtcacagcctcaatagccgaattcataatcgacgacgtatcagacgacgtatgacccaaaccagtcagcttagcctgagcctcatcaatagccatagcgcgagcaataccgccaccaatagtcacatcatagatagacttgaggcccttcttagcaacattgatggcgcccaccattgcggcaccacccaaagccaacttcatgcccttagcaaacaagctacccgaacgctgaccctccgcaggcatcacacccgacaactgtttaccaacatccgccttcaaaccgggcatcttcgtatacaacgacacatatgcggaagcaatctcaccagacatacactattcaccccataatattaatctcgcgagacaccccgccaccagcacgaacacgcgccaaaatatcgtccacctgcccagacgtaaaccgggccctacgctcatccgtaggcctcgccacaggctccggctgcccctcactattagcagacctgtaatgatccagcatgtccaacacagcccactcgcaccactcaaacgggcgctgccaaccattcaagtgggccgccaactggctagacgtatcggtacacaacacgccagccagccggacagcctcaccccaacacatatgcgggccaccaacactataaacagaaacaccaaacttggtgcggaaatcgtattcgatggccccacgataatcatcaatcaggccgtggagccaaactattcccccagcgaggcacccttaccgtcaggcttatattccatccactggcggaaaatctcggccacacgaaccataggaagcccctccaaggcctccacagcatcctctggggcggcagcctccaacatagaaaacatcacctcaacctgggcgaaatccgcagactcacccgactgggcaatcctggctgcacggcgaaaaacgcgggcaggaacagcctgagccgtctcctccgcatccgccaacacccagctacggtcaccaatctttaacgtgtaacctgtgtcactcatctatcaacaatccctcaaactatgtgtatcagttctcagacggcggattaggatccggctcaggcttcggaggaaccggggccggaggagtatcagcttttaaagccgtcatccacccccgaccagacacagcattaccagtcttattaatctgagcagggtaagccttcaacgtcacaccatacccgtacacttcgccattcttgcccttgatctcgtcacgatcgataagctcaacctcagggaaatagtagcgaataacctgatcaccatcaacaatatccatcagtaaagcgtgcacgccagtagtggcgccaggagaaatatcgaacgaacccgaatcggatccggcagtaaccttcgactgccaaaacagttcgataacctccttcttcgactcgatcagctggaaagaaatctcgatagacgactccgtggccacagtgcgaacaacatccgcattctgccaagccttcaaatcatccgttttacgctcaggcttaatcttaaacccgtcatccgacagataccctaaagcggtaagcccatcaggaaccgtcttcacaccatcaatagtgtcaccagcatgagctttaccaatatagacgtcacccgtaacagcagagcgaacattagacgctttacgtgttgcagccatcacaacccccattaaatatcaaacaattacattaaaacaaaaaacaataagcttattcagactccgcaggcctacatatcagctcaaaaagcgaatacacatcaaaacgtgcaccatcaaccagcaaatcagggccagtagaccgtttacagtacaccacagggtcaccgtccacaccatcagccagcacagcctcaacacgacgcgccaacgacatagcacgatccggcgtatccgaaaacacattcacccgcaaaaaaacttgctcacgaacatgcaactgcgggccaccatcaagagccaaccaaatcagatcaccgctgaaatcgtcaggcaccgtccccacacaaggtatatcagacagccagccatcatccgccaaaacgcgtttagcccagactcttgggtcaccgtaaatgatcacgacgcagccccaatcgacctcgccagcgtgccatgcttcgcctcaatacgcttcccacccttatatgtggtgcctatacgggccacagcctcgacacggtgaacctgcacctccgatgataatccgctacggtattgggccttatcgaaagcgttaccgcccacattcgccgaggctgcacgcttgacacgctcgccacgctcagccaacatgccctgcacaccaggggacttcaacacctcacgaatacccggcaagttcagcttcacattcacatcctgagccactacccatcagcccttcttacgcttcacattgatctgcgtgcccgcatcccaaccggacattgggtgatgccacaccataggagacccgtcagcctcccacacaacaccccgaatacgccaccggcaacgataatcagcgcccacaacaggggacttgaaaagcatcgaccaatgctcataatcagagtcacgccccgcggcctcatcctcctgcgaaacggaagcatagatggccacattatggaacacagtctcaacaggcttagaccaatcctcaaccttgtcaccaagatcatcgacacgaacagtcggttgaagcatcacaactgtttcaccgtaaggaaaactggtcatatcatatctcccacaaagggccagcgtagccgttaatattcgacccgcacgagcaaccttccccccacactgtggaacacacctcagaatgattcacactactcctcatggtcggtgtaatagtgaacgctttaccagccccaccatcacccccacacaacttcttcaacgcggcaatctcagaaggccacaacaaattcgtgggagtattagaccgtgtagtctgagcgaaaggacccgcagactcatactgcacctgacccgacacgccagtatcattccagcgcaacaaagccctgcgcagaatagccttagcggcatccttgtatttgaaatccggtttagcaatacagggggcgacactgatagccacagcctccacatcggcgatcatcgcctcaagcttctctctaggaatatcggcgaaaggctcaatatcctcaggcttcaaaatgatacccatcaacaccaccccctgcacacagcatgaacattatcgcaacaaatgaatcaattctcggccggcggattaggcttcggcgcagccttctccctcacaacagcaaacgaatcaagcgactcgatagccacatacagcacagcctcggcacgaaccataacctcattatgacccttaaggtcacgcccagtctgatccgggtcaccatactcgatcagttcgatcgggaagttacgctggaacccccaatgaacacgcgagaaatcaccaacaatagccttaacaccagaggcaggcgacatctccggggcacccgaaacagtcgaagaagcaccaacattcaggccgcgccaattatccaaaccggcaaacccgacggcaggatacatcggctgaccggcaagcggagaccccttcggatacacctcagtagacagggcaaacgagaacgcgggatccaaagcaacaccgttaggaacctgcaaaccggcaccagcgataagaccgacagccttgaccagatcggtcgtagcagaatccgtggcatcaacaatatgcttcgtcttatccagcgaagacttgacagccgcagcaggcttacccgtagccggatcaataccgtggaaggcaatcagatccacggcgcgaccaatcgaagcaccaagagccggggaaatcagatcctgcaaaacacccagacggtaatccgcatcagcccacataaactcgtccgagacacgctgctgagtcacaaccttgataggctgcgcagtaaacgccgaaacatcaacagacgcggaaggcttaacctcaccctcgccaacaatcttagcgcgaggaacaccactaaacacggcacccttgacagggccgaaaatagtcggctgctccggcgaaagcttcgccaaaacaccagaatcgatagcacggtcacgaaccgcaccaatcatagaaccaggaagctcaagcttccctgcagaaagaaaatcgtcagccatcacaaatcatctcctagaattattgacaagagcatccacaaacgcgacaccctcacgtcgtttaacatcatcaacgggggcactccccgcaagacggcgcacacccgcgccaccactactatggtcgatcaaacccttcaaagctttcgcagactccaccagtgcttcacgatcgctaccgtgcaagaaagcgaccgcatcacccgacaggccacactcggcagccacatcgcgcttcacaccctcaagaacaaacccgttgatccggtcttcgagttcctcattcttgcggcgaagctcatcaatcacagaccccgcatcaccatccgaggcgcgaagcttctccaactcggcgaaattacttttagcacgagactcccacttacgggcctccgccttccaatcagtccccggcgatttaccctcgccttcattcttcaactgattgtcggctacctcctgcccgccatcgtcttttactgtatcaacaatgccgttatcctttccggactccacaacatcattgtcaacactctgttcttcaactttttgatcggccatagcctaaccctatactccttgcggaaaacaacacaacattgttgacccccgtgcgggagacaaccctgtgcaccgataaccggcaatgcacaaccggaaaccacatcaaattatctcatgccaccaacagtacgcatagccttcaaaatattgccaggcgactgctgcaacccatgatcatcaacccactcacgggccttctcatacgtcctctgatactcggcatcagccctatttggttcccaagggccaacaacctcaaccaccgtacaaccacaatgatcatgatacttcgaaccaaacggacgcttaccaccacgcttatgacgccgcgtatgaccagtagtaagtgccctttctttggtcgtataatccgacctcgtagccaacatggcacaaaaagcacacggatcaccatccgtcaccctgcgccacgacctaccctgcgcaccagcagaccactcaaccgtgtcacggccagcattcatgacagcccgattaacacccgccgccatagcatcaatcgtatcattcgccctatccgggtcactctcaagaatcttcatagtcgaaaacgacctagccaaagccgccgcagcatcaaactcgtcatacacaatcaaacccggatccacaccattcaaccggcgaaaatccgacacaaacctggcagccaacgatgccgaaccatcatggccggcacgctccaactccacacacaaacgaacatactgcgtgtcactcatcctgccggcacgccacaaacgacccaactcggcataatagcccgcatacttcccggcaaaacgaatcgcctgccactgatactcagtcgccacaagcctcgcctcaacccccgaagccatcgcctatcatacctcgttagtttgacgcgatatcgccccagccagtgccgccaacgggtcagacgactcagcacgatgacgcatcacagcctcaacctgcacatcatcaagccccaacatctccaacaccgtacgagaatcagcaggcagaataccggcaccaacaagcttcgtcacagcatcagccgtagccgcccgagtcggcgtcgacgcatcacgccaacgcaaaccaacatcaccaaaaaaatcggcctcatcaacactcgaatccaacgccttagccgccaggaaaccaaccgacagccaaccctgaccaaacgacgtttgacgccgctcagcacgcttcacaagccgagattcctcggcagccaaagcctccccactaggtgggttagacgtgataaacccgaaatagcgttccggaacagccgcctcacccgcagtcaactgcgccaacagtctcatctgatccgaatacggtgtaggcgaattgacaggaaacgaccccacattcggagtgtcaccatcatcatccttatccacagcccacacagaagccatcgacaggacccagccaggctgcgaaaactcgtcagccgacacacccgtaacccacctttgcggataggcgtagaagtcacgattcacagactgccccaacagtgtgcgaaccgcctcatcagtgtaagccctaatcgacctcgtaatctccgaacggccatcaatcctagaagtacggcgacgattcacaataggcaccaacggaaccgcaccaagactattcacgatacggcccgtctcaacccattcacgcgaaccccgccgctccacctgaacaatcacatcaggcagcaacaactccgcctcaaccacctccggatcacacgtctgctgcaccaccacacccgcatccaaacgagacccgtcagccgaaaacttgcccgtacaattctttggtgactgcggacgaaccgacaccgtaccatcaccatgaggaatgatcgcaacaaacgacaacccaaaaatcagcgcatccaaatgcacatcacacgaagccgtagcaagccgattcgcagcatacacaccatccagaccgtagccgtcaccattagtccagccaagccaatccagacgctcctccaaagcatccacagctataccaggccacgacaccaccgtctgcacccgctgcaactccggcggaatagccacaccaaggtcacgcacccgattagagccctcatagtagccctcaatacgacaatgccacgaagacaacctttggatacgatcgtacatgccctcaatcagagccaactcatccgagttcataccacagacacccgcttcctaccagacctctcacgccgcctagccttcgccatcttcacaccaagatacgccaaagacacagcctccaaaggaacctcagaaccatccttaaacgaggaaccccaaccccacgcagagcctttctttttctgaaccgccgacctcacagcaatatccaacatatcgcgcctcgaatcagcatgaggatgagaaacattcccagaccttacaccctccaggaaggcttgacacgcctccacatacacaccagtatcggccacaatcacgccacggcccggaataccacgatccgtcaacgccttctgcaacaacaccgcaccagacccggcaaccatgatccggtcagtatcaccccaacgaaccgccaaccagtcagccaaccggcccacaccatcaacaatcgttcccgacagcccatcaataacctcaacatgaaccccagcatcagtccggccggcaccagccaaagcaacccgatccccagaacgagaaaacgagacaccaaac

SEQ ID NO: 6 - DNA, 29698 bp, Propionibacterium acnes bacteriophage
acatatgcggaagcaatctcaccagacatacactattcaccccataatattaatctcgcgagacatcccgccaccggcgcgaacacgcgccaaaatatcgtccacctgcccagacgtaaaccgggccctacgctcatccgtaggcctcgccacaggctccggctgcccctcactattagcagacctgtaatgatccaacatgtccaacacagcccactcgcaccactcaaacgggcgctgccaaccattcaggtgggccgccaactggctagacgtatcggtacacaacacgccagccagccggacagcctcaccccaacacatctgcgggccaccaacactataaacagaaacaccaaacttggtgcggaaatcgtattcgatggccccacgataatcatcaatcaggccgtggagccaaactattcccccagcgaggcacccttaccttcaggcttatattccatccactcacggaaaatctcggccacacgaaccataggaagcccctccagggcctccacagcatcctctggggcggcagcctccaacatagaaaacatcacctcaacctgggcgaaatcagcagactccccagactgggcaatcctggcggcacgacggaaaacgcgggcaggaacagcctgcgctgtttcctccgcatccgccaacacccagctacggtcaccaatcttcaacgtgtaacctgtgtcactcatctatcaacaatccctaaaatagtgtatcagttaccggccggaggattcggatccggctcaggcttaggcggcttaggaggctccggcttcggagaaggaggaaccgggggagtatcagcttttaaagccgtcatccacccccgaccagacaccgcatcacccttatggttaatctgggcaggatacgccttcaacgtcacaccatacccatacacctcgccattcttgcccttaatctcgtcacgatcgacaagctcaacctcagggaaatagtagcgaataacctgatcgccatcaataatatccatcaacagggcatgaacacccgtcgtggcaccaggagaaatatcgaacgaacccgaatcggctccggcagtaaccttcgactgccaaaacagttcgataacctccttcttagactcgatcagctggaaagaaatctcgatagaagactccgtagccacagtgcgaacaacatccgcattctgccaagccttcaaatcatccgttttacgctcaggcttaatcttaaacccgtcatccgacagataccctaaagcggtaagaccgtcaggaaccgtcttcacaccatcaatagtgtcaccggcatgagctttaccaatatagacgtcacccgtaacagcagagcgaacattagacgctttacgtgttgcagccatcataacccccaaaaatatcaaacaattacattaaaacaaaaacaataagcttattcagactccgcaggcctacatataagctcaaaaagcgaatacacatcaaaacgtgcaccatcaaccagcaaatcagggccagtagaccgtttacagtacaccacagggtcaccgtccacaccatcagccagcacagcctcaacacgacgcgccaacgacatagcacgatccggcatatcagaaaacacattcacccgcaaaaaaacacgctcacgaacatgcaactgcgggccaccatccaacgccaaccaaataaggtcaccctcaaactggtcaggcaccgtcccagtacacggtatatcggacagccagccatcatccttgagcacgcgtttagcccacttcctggggtcaccgtagacgatcacgacgcagccccaatcgacctagccagcgtgccatgcttcgcctcaatccttttaccacccttataggtggtgccaatacgggccacagcctcaacacggtgaacctgcacctccgacgacaaaccattacggtattgggccctatcaaacgcgttaccgcccacattcgccgaggctgcacgcctcacacgctcgccacgctcagccaacatcgactgcaccccagaagacttcaacacctcacgaatacccggcaagttcagcttcacattcacatcctgagccacaatctatcagcccttcttacgcttcacattgatctgcgtgcccgcatcccaaccagacattgggtgatgccacacgataggagacccgtcagcctcccacacaacaccccggatacgccaccggcaacgataaccggcacccacaacaggctgcttaaaaagcatcgaccaatgctcatagtcagagtcacgccccgcggcctcatcctcctgcgaaacggaagcatagatagccacgttatggaacacagtctcgacaggcttagaccagtcttccaccttgtcgccaagatcatcgacacgaacagtcggttgaagcatcacaaccgtttcaccatacggaaaactggtcatatcatatctcccacaaagggccagcgtagccgttaatattcgacccgcacgagcaaccctcaccccacaccgtggaacacacctcagaatgcacatatcgaccattaatagttggagtgatagtgaacgctttaccagccccaccatcaccctcacacaacttcttcaacgcagcaatctcagaaggccacaacaaattcgtgggagtattcgaccgtgtcgtctgagcaaacgggcccgcagactcgtactgcacctgacccgaaaccccggtatcattccagcgcaacagggccctgcgcagaatagccttagcggcatccttatatttgaaatccggtttagcgatacagggggcgacactgacagctacagcctccacatcagcgatcatcgcctcaagcttctctctaggaatatcggcgaaaggctcaatatcctcaggcttcaaaatgatacccatcaacaccaccccctgcacacagtacacattcgcttatcttgtatcagttaccagccggaggaggagtcggtgcagccttctccttcaccacagcaaacgaatcaagcgactcgatagccacatacagcacagcctcggcacgaaccataacctcattatggcccttcaagtcacggccagtctgatccgggtcaccatactcgatcagctcgatcgggaagttacgctggaacccccaatgaacacgagagaaatcaccaacaatagccttaacaccagaggcaggcgacatctccggggcacccgaaacagtcgaagaagcaccaacattcagcccacgccaattatccaaaccagcaaacccggcggcaggatacatcggctgaccggcaagcggagaccccttcggatacacctcagtagacagagcaaacgagaacgccggatccaaagcaacaccgttaggaacctgcaaaccagccccagcgataaggccgacagccttgaccagatcagccgtagcggaatcggtggcatcaaccgtcttcttcgtcttatccagcgacaccttgacagccgcggcaggcttcccagtggcaggatcaataccgtggaaagcaatcagatccacggcgcgaccaatcgaagcacccaaagcgggcgaaataagatcctgaagcacacccagacggtaatcggcgtcagcccacataaactcgtccgagacgcgctgctgagtcacaaccttgataggctgcgcagtaaacgccgaaacatcaacagacgcggaaggcttaacctcaccctcgccaacaatcttggcgcgaggaacaccagaaaaaacggcacccttaacagggccgaaaatagtcggctgctccggcgaaagcttcgccaaaacaccagaatcgatagcacggtcacgaaccgcaccaatcatagaaccaggaagctcaagcttacctgcagaaagaaaatcgtcagccatcagaaatcatctcctagaattattgacaagagcatccacaaacgcgacaccctcacgtcgtttaacatcatcaacgggggcactccccgcaagacggcgcacacccgcgccaccaccactatggtcgatcaaacccttcaaagccttagcagactccaccaatgcttcacgatcgccaccgtgcaagaaagcgaccgcatcacccgacaggccacactcggcagccacctcacgcttcacaccctcaagaacaaacccattaatccggtcttcgagttcctcattcttgcggcgaagatcatcaatcacagaccccgcatcaccatccgaggcgcgaagcttctccaactcggcgaaattacttttagcacgagactcccacttacgggcctcagccttccaatccgtgccagaagaagactcctccttcacggaaacatcaccggcatgatcatcgccggcagcctgcccatccttcacaacatcaacaacgtctccaccctttccgggctcaacagcatcattgtcaacattctgttcttcaactttttgatcggccatagcctaaccctacactccttgcggaaaacaacacaacattgttgacccccgtgcgggagacaaccctgtgcaccgataaccggcggcacacaaccggaaaccatcatctcatgtcgccaacagtacgcatagccttcaaaatattgccaggcgactgctgcaacccatgatcatcaacccactcacgagccttctcatacgtcctctgatatgcggcatcagccctattcggctcccaacgcccaacaacctcaaccaccgtacaaccacaatgatcatgatacttcgaaccaaacggacgcttaccaccacgcttatgacgccgagtatgacccgtagtaagcgcccgctctttagtcgtataatccgacctcgtagccaacatggcacaaaacgcgcacggatcaccatcagtcaccctgcgccacgacctaccctgcgcacccgcagaccactcaaccgtgtcacggccagcattcatcacagcacgatcaaaacccgcagccatcgaaccaatcgtatcattcgccctatccgggtcactcttaagaatcttcatagtcgaaaacgacctagccaacgcggcggcagcatcaaactcgtcatacacgatcaaacccggatccacaccattcaaccggcgaaaatccgacacaaacctggcagccaacgacgccgaaccatcatggccggcacgctccaactccacacacaaacgcacatactgcgcatctgtcatcttcccggaatgccacaaacgaccaagctcagcataatagcccgcatactttccggcaaacctgaccgcctcacgctgatactcagtcgcagcaagcctcgacatagcacccgaagccatcgcctatcaaacctcgttagtctgacgagaaatagccccagccagcgccgccaacggatccgaagactcggcacgatgccgcatcacagcctcaacctgcacatcatccaaacccaacatctccaacaccgtacgagaatcagcaggcaaaataccggcacccacaagcttcgtcacagcatcagccgtagccgcccgagtcggcgtcgaagcatcacgccaacgcaaaccaacatcaccaaaaaacgcggcctcatcaacactcgaatccaacgcccgggcagccaggaaaccaaccgacaaccaaccctgaccaaacgacgtctgcctgcgttcagcacgcttcacaagccgagactcctccgcagccaaagcctccccagaaggcgggttagacgtgataaacccgaaatagcgttccggaacagccgcctcacccgcagtcaactgcgccaacaaacgcatctgatccgaatacggtgtaggagaattcacaggaaacgaccccacattcggagtgtcaccatcatcatccttatccacagcccacacagaagccatcgacaacacccagccaggctgcgaaaactcatccgcgctcacaccagtcacccaacgctgaggatacgcataaaaatcacgattcacagactgccccaacagtgtgcgcacagcctcatccgtgtaagccctaatcgaccgagtgatctccgaacggccatcaatcctcgacgtacggcgacgattcacaacaggcaccaacggaacagcacccaacacattctcaatacggcccgtctcaacccactcacgagacccacgccgctccacctgaacaatcacatcaggcaacaacaactcagcctcaacaacctcaggatcacacgtctgctgcaccacaagaccagcatccaaacgagacccgtcagcagaaaaccggccagtacaattcttcggcgactgcggacgaaccaacaccgacccatccccctggggaatgatcgccacaaacgacaacccaaaaatcagtgcatcaaggtgaacgtcacacgacgccgtagcaagccgattcgcagcatacacaccatccagaccgtagccgtcaccattagtccagccaagccaatccagacgctcctccaaagcatccacagcaataccaggccacgacaccaccgtctgcacacgctgcaactccggcggaatagccacccccaaatcacgcacccgattagagccctcatagtagccctcaatacggcaatgccacgaagacaacctcttaatacgatcgtacatgccctcaatcagagccaactcatccgagttcataccacagacacccgcttcctaccagaccgttcacgccgcttcactttaactgttttcgcaccaagatacgccagcgacacagcctccaaaggaacctcagaaccatccttaaacgaggaaccccaaccccacgcagaacccttcttcttctgcacagccgacctcacagcaatatccaacatgtcacgcctcgaatcagccctagggtgagaaaccacaccagaccttacaccctccaggaacgcctgacacgcctccacataggtgccagtatccgcaaccaccacgccacggcccggaataccacgatccgtcaacgccttctgcaacaacaccgaaccagacccggcaaccatgatccggtcagtatcaccccaacgaaccgccaaccagtcagccaaccggcccacaccatcaacaatcgttcccgacaggccatcaataacctcaacatgaaccccagcatcagtccggccagcacccgccaaagcaacccgatccccagaacgagaaaacgagacaccaaacactttcccgccaaccagactcgcctcatccaccgcagactgagcccacttatccgccggaaccacagacgcagcagactggccacgatcccaccagccaagccgctcccgagcaaaacccgcagcagacatcgactcatgctcatcgcttacggtcccaaaattcagacgacgccccaacgccggattagtgtcacccgccaacttccgccactgccgcgacacatcatccggatccgactcgtcaggaatcgaaaactccgtccacgcaaaccttttaccgccaccaagcgcctgcccacgcaaacgcaacaccacagacccatcagccaacggcccaggcggcgtacccaaaaaaatctgctgcggatcacccgaaggagccgcagacaccgtaggaagcaaagcctccaactgctcatccgacaactcctgagcctcatcacacaccaaatcatcaaccgtaaacccgcgagccgaaccacgagaacgggccacaaactcaaccgaaccccaacccggacaaccacacttcttctcaaaagtcggacaatccggatgatgcaacacaatagcctcctgaccattcgtcgcccgaatcgacttcaccatacgatacaagtcaggaaactgccgctcattctcaaaaaacgaacgcaaccgcataaacgccttacgagccgacttcaactcgtgagccgtatgcaaaatacggcgaccctgaatagtcgccttaaacaactccacaatctccaaaatagcattcttgccattctggcgaggcacaaacaccccacacacacccgaagcaagcctgccattgctaccaacagcaagccaatcatccaacacctgctgctgccacggatcaggcgtcaacccatacgcacgacccaactccccagcatcaccgccagcagacaccgaatacgccgcagccacccggtgacgaggaacctgagaacccacaacaccagacacctaatcaggcccccctgcgcttcctataccggtcaatcatcgccaccgcagaaccgccaccacggccaccagacaccacatcaaccgaataccgatccaacatacccataaaagccttcacatgagcacgcaacgaagccaccaaatccgcgcgaccctcacgccacacacaatcatgaatcaccgcagcatccatgagaaacaaccactcctcatcagacacgtactgcgcgcgactatcctcaccccacacacgccaccaacgacgcgtctccccacaccaatcacgaccatcaggaagctcaggctgcacaacactcaccaccaacacaaaaagtcgacaaacatacaaaaccacaaaagggaggtatttcactaagccgtacgtggtcttgcacgggtgtgcagggggtgtccccggtgggggttggcgggtttttcaccatggaatcaatgtttttgtggtttgttgttggaatgtgatgtttggttcgctgcgattgcctttgcttctgttgcatgttctgcagatgatttgcccgttgtcgagggtgttgagtcctcccctgctgacgggtgtgatgtggtcggcttcggggctggttggcaggtcgtgtgtgccccaggctatctgggctccgcagagtgggcattcggtttggccttgctgtcgggcttgggtgatgagtcttgcccgccagcgccggtgggcttggctggctgtacggttggtgcgtgccatgatgtgtctgttcctcgcctagccctgtacgggtcttatttgcccctctaccggcctgggaaccgttggggtatgaataccttgcccttgccctgctgatcgatcctaggggcctttttgttcgtttgagggggtgttctgttttgtgccggggtggttgttttctccactaccccctggcatgtgaaaaatatcacatcaccccccagcggtgtcaaaagaagaaagacacgaaagaaaaaagggggtggatgggtgttcgcgtttcacagcttagcgctgggcgcctagcgctaaaggacacaggctaagcgggaacaccttaaggttttaaagtcttctacatataatatacactttaagtctcacccggtgttaagggtgtgagcgtgacacgccgtacgccttcagccgaacacgccaagcctgaaagggacacaggtagagtaagtgtggtgagtgtgcaaccgggagcgtgcgaccggtggtacacgagacacacggtgaaagcccatcagcgttgacggccaaaggttcctcttctcccctgatgaagaaaagaagagaagagagaaagaaccaaagagagaagagaagtaaagaagttaaccccttatctcttctaaaacttttataacctataagctttaagacttataggttataatattaaagtttaagactgatggttaactttaagtacttaaggtctttaagtcttaatagttattttaagttttaaagtcttaaacactgatgtgaagtttatatccttaagtactaagcctttaaggttttatacttaacttaggtgttaagatctttatactgatgctgagccttgaagggctcagtgctaagtgtgtaagcctttaaggttattaattaactttaagtgctaagctcttaaagtttacttaaagtgtttaaagctttaagactgatgccgagcccttgaggggctcggtgctaagctatcagcaccttagcgctaagcccttaggtctttaagtctttggtagactgatggatgtaagggtgaaagccgcgtcagcggatttcggccttgcgtccagctggctacctgtccagcctatcataccccacctgggatgagtcaaactggtggatttggctctataggctggtttgaggggtgtaaacgggtgtttttggtggtaaaggtccaaaaattaaacctaaacttttccttaaattttcttagagtcttgtaacctttgagggtagttaagactgaaacccctagtcagaacgggtttcactcccgaacagctgtcacacttcactcttgtgtcctttccgaacacgctaggcccatcagtgctgagggtgttccctcaggctttcgagtactcgtcgctaaggctcctcgtactctcaagccttccctgatggcgtgtacttgctaaggctgtgcctgttcgggctgatgccgagcccttgaggggctcggtgctaactgctaagaccatcagtgctaagcgctaagaccttaaggcttgaaggctgatgctcccctctttcttttaccgtgtccttcttcccccttagtatcccacactgtccacatagttgaggcttagctaaccaggataggggttgatggtctatgccgagatggttgatcgcgtatcaggctgtgggggacgtctagaatcgatcagaattgcttgggggtataaatacctagcccccaccctgtaaggcgctcctaggcgccgtgtgaaggctttaaatggtatttctgggctacacccttcacgtcagattggcagagtggtcttgagggtgcatactaagccaggagtatgtgatacatctcacacacctagatgatagatcttatgtctcatctcggcgccttgactcgctagaccatctgccacacccgccataacccagacacacccctaaggcgccctagaagggccctagaatcgatctgcagggtcaaccctatataatcctaccccggacatatttcaggcgctgagagaggcaataaaggcttcagtgacatctgtcacacccgacactccagcatgaaacgctcaatccgaatgagcgccaccttgactatggatcacaacctacacactctagaaaccacaacaacccccacaaccgccgaaaggagcacaccctcatggatggcacactcatcacaccatcattcaccagcctctatgggcagacagaaatcaacccactccaccccgcacacctggcaggatgtgacataggcaacacccacacgtctatcatctgccgcctgtaccgtgccaaagtcgaagaagccatacgactcatccgacccatgtggactgtcaccctcgacggtgccatatacggaccccatgactggcagccactcaccgcggatgaagctgaggacctccacgacatgatcgacacgatcgacgtcgacgccatcatcgccgaagccacacgataaaactatcaacccaccacacgagaaaaggaatcatgatgcagaagatcgccaaccacttcacccagctctacaccccagccagctacgactgccccacacccttcgacctgacacgcctcgaaaacctcccctgcgaccacatggattttgagggcctcgccgaagcctaccggcagagcgtggaagccgaactccacaagctacgccccaacacattcatcgcctccgatggcaccgtgttcagccatgacgagtggaagccgctcactggcggtgaagccacacaactctactggaatgtgagccgcatcaacgtaggccacctcctcaccctgtacagccgatagccccccaccccacaagaatcactcgtacacaatgagcctagaatcgcctagaaaatacctgacctatataatcatacccccaggggctgaaagtcgctctaacccaccgagtcacagcttaaaacacgaaagaaggaccaatcatgcaatggacatgccacaagtgcgatagcacaatcaccggataccgaccagaacactgcacagtctgtcacgagacattcactagtactcgctctggcgacatgcaccgcacaggcgatcatggagtcaaggaaggccccagtcgtcgcaggtttctcaccgtggacgagatgaaggctaagggtatgaagcgtaatcgtctcggctactggactacaggacgtgacctgtcatacctcaaggacaaaacacctagccacacaggaaacgctcacaatcgttgagcgcagccttgacacgaggtccagtcactggaagtattgatcatgtcagcaacgaacaacaccccggaaaggggacaacagtcatgaacaagaaaaaaggctacaccatcgccggcgccacagccgccatcattgccgcagcctcattcatgccagccccagacgacaatccgccactcgcctcccagccagccccacaggccaccacagccaacaccgaatggacccccaagactacccaacagcgcaaagccgagaaagcggcacggcaggcagccgcagaacagtcactgcgagccgagcaggccaaagcccacaagcaggcccaagcaaggggtgaagaaacctcacaaggtctcaccatgatcacggcagcacacgcctgcgaccgcaaagccgaacagaaagccgcagcgcaaggcgtcaaatggaacggcaacccagacatcgacctccaactccacaaaattattggtaaagacaccttcagcatcgtctacggcgccaccgtccgccagccgggagcatccaaactacccgtcaccgtccactgcctcgtcaccggaacagaagaccacccgcacgtcaccgacctcaacatcaacccgcaacagtaacccgccaaggagcatccccgctatgcctctcctctcccactacgctgtcaccaccggactcgccgacacggcacacatcattcaccacaccggcggcacactacgcacagccaccgacatcgcctcccgcatcaacaccctcaacccagacattgatctcgaccaccaaatcaaccaactgttatctatcgaaacagacctgtacaacatttataaaaccatcaacaccattcttcaggagcaagcatgaacacacccaacaacattgagctacacagctacgaaacgttcttcaccagcctcgcctggatccaaggcgccatcatcacatggatgtacgcaaccggcaccccacacaaggcagccctcgccatcatcgccgcatgcgccctcaccaccctcctgggtgcctccacactcacctaccagcccaaaaacaacaaatgatcacaacacccatacttattgctgaaaccctcgccatcattattctcgccgtagcactcgcccacaaccccaaccagtaacccacccctaaggagcacacccccatggataagccaacccgcatgtacaccgaccccaacagcggtgccaaaaaagaattgaaactttgcaggctatccctcatcgaccccgcagccttgcacgatctaggctccgtggcaggatacggtgccaccaaatacggcgacaacaactggaccggcggctatccgtggagccacagtgtcgacgccctctaccggcacctactatcatggcagcaaggcaacaacctcgatgatgaatccgggctaccccatctagcccatgcagcctggcactgcctagcactcctcgcataccagcaacaccacgccggccaagacacccgcaacccatggaacacccacaaaggcgacaagtaatgcctctagcacaaaaaccatccaccatcgaccatccaggccacatctcctacagttcactcacccagtgggccgaatgcggagaaaaatggcgcctatcccacggctaccacgcccaacaccacacctggtacgccaccatcgccggaagcgccatacaccacatcaccgaacaatacgacctacacctgtacaatcccgccgaataccctgcactgccagacaaactctcatccttcacaaacattttcgacacccaagtcgccctcgccgaatcagaaggcaccgaaatcaaaccctccggcagaatatgcaaaaacatgtgcgagtcgggcgggccacacaaaaaagactacaattggtggatgatatacggccccacctttgtggaccggtggaaaacatggaggcgcaaccacccagaatacatcaccgctgttattgacggccagccaggcatcgaatacccggtagaaaccaccctccaggatggcaccactattgttggctacatcgaccgtatcttcaccgacaccgacactggcgaaaccttcattttggacctcaaaacaggacgcctacccgccgacagcatgcagctgcacacctaccggtacatgctcaaccaacacggcatccatgtcacgaaaggcatgttttggacgccagccaccagccgcaacgacgacaagtccccgacacaaggcacatccaccgaactctatgaccttgacaacaacacctaccggcatgtatcatccatgtacagtcaagcaatgaaaggaatcagtcaaggcatcttcgtaccccatgtcacagcactctgtaaaggctgccccgtcaaggacgcctgctgggctgtcaacgggaaagacgcctacaggtaccctatagaaacaaccatcacagccccaacaaaagaaggcaaggaacaccagtgaccgacaacacagacgacgaccgattcaccgtcacactcaaatacggaggcgactacgccgccccatggaccgtcatccgcggagacaccgccgaccaggtaaagaagactatcatcgacctgctaggcggactcaaaaacagctccgcggcaaggaactgggacctggcaacactgatcgccacagcatccataatcctccaagatcgctacaatcaggccgccaaagactacgtagacaacatcgcctcagaaggaaacaacaccatcatcgacaaaatcaacaatgcaacaagcaaagcacagctagccgacctcctcaaacagtacaagaagaccatcactagtaacagtgacgtgtccgaggcgttccgcactaaacgaaacagcctcacccgataaaaaccaacaaacaaaccaacacaaacagtcaaggaaacaacaatgggactcgcaaactaccgaaacaacagcaacagcaccttcttcaacccctcccgaaaccaggacgccaccgccatcgccttcaaagtccgcgacgtagaacacaacaccgaaggctacggtggacaggtcgcagaccgcatctacgctgatgtcacaatcttccacaccctagacgatctcaacaacggcaccccagaaaccatccccaacgctattattgagaaagcacgcggcaacaacgaccgcccacactccatgatccgcgacctcgaagcctaccttggcgaggagcaggccttcaaactcgccaccgtacgcaccaaaaacggcttcaacgcggtcgtgctcaaaccccttgatgacgccatctacgataaggttgccgaatacgtagacaaacgcgataacggccagctagacgacaccacagcccccgccgatgctgacatcgacatcgactccatctgaccaccaacacaacatccaaccgatagacagatagattaaggctccgatgctctctctccaacgatccttcgagagagcctcccaaacagccgccgagctgccccgcataccacaactagaacccctctaccgcaacctggacatgcacatccacaaaggggacctcgtcatgatcgcggggcggtccggcagccaaaaatcagggctagccatgttcatcacagcaatgctcaaccagcccgccctctacatatcaggggacatgacaccctgggaggcctccacacgaatcatctcactcaacacccaacacaccaccgcccaaatacaacaaaacatcgacgactacgggccagaatactatcgagacagcatccaccacggccaacacatcacattctcattccagtcacccatcacctggaccgacatcaccatggagctacaagcctacatggaaatgtggaacaccttcccgccactcattgttatcgacaacctgatggacattcaagactgcgagagtgactaccaggcccagcaagaagccatgcaatggatcacagcattaggtagagatactggctccaccattattgtcacccaccacgcaaccgacaaaaccggaaccgacatcgaacaccccccagctaggcgggaaatcaaaaacggcctctccgaaaaaccacaactcatcctcggagtctcattgtatggtggcgaagacaacggcaacgggctcaccatccccgccgaggcacgcatcgccgtactcaaacagcgcacaggcaaatccagcccagacggaacccgatacgaaagactcagagcctaccccgaatacacattcttcgggccactcgccgaaaaacagccatggaacatgaccgaacaccacaaaggactatcatgtcaacacaacagtcacgcaaccgccgggccggcgcagaatgggaaacacgactcctccaccagctacgcgacaccggctatgatatagagcgcctccacctcaacggccgcgaagacgaaggcgacctcatcctcacaaccggccacaaaacctacattatcgaggcgaaagccggacagccacacctagcccaattcgtgaaacaagccagccgggaggcacgcaactacgaaacacaccgaaacaaacaaaacaattccaccatcggactcgtagtgatgaaacagcgcaacaaaccctggagcgaagcctatgtggtatcaaccctcaacgagctcctcccacacctctgacacctgccgcctcctcgacacctaccagatacgctacaatccttccaggaacgagcaacacatcctctgcccgttccacgacgaccaccagccctccatgagcatcaacctcgacaagggcgtctggtactgccacacatgcggtatcggaggcggactcgccaaactgaaacaacaattagagaaagaaaacccgaatgtacgactcactacaaccctacaacattgcggaacgccgccgaatccagaaagcctcggccctctacgaaacccacctcgaaaacatactcgacctgctctcagcaagaggcatcagcgaagaaacagcccgctaccaccaccttggatacatcgacaatgaccccatcccaggccacgaagactacaaccagtgcatcaccatcccctacatgtaccccgtctggggcggcccagccgaaatacgaaaaatgcgtttccgctgctcactccagcatgattgcaaaacccacaaccaccccaaatatctaaccccggcaggagacacaggctccatctacaacatggccgccatggccaacccggcagccgaaatgcacatttgcgaaggcgaattcgactccatgatcctcgaacaatgcggatggtcggccgtagccctacccggggccacctcgtggcaaactttctggaccaaattttttgaaggctacgaccgcatctacatctggtccgaccccgacaaagcaggagaccagatggcccaaaccatccaggcggcactcccccaagccatacacgtacccctcactgtcggggatgtcacagacacctatctgcaggccggaaaaacagggttgacacaagcactagacacagtgctacaataaaaccacacaagcaaccccaacaaagaaaggcataaaaagcatcatggaccccctcgacacatgccccatccccggccgccgcgacaccagcaaagccgcccggaggcgtatccgcctcgccatctgtgcagaaaaatgggccgacggcgtggacccactccacatcatgcacacctggggcaccacctatgatgggatgcgatccatgatccgcgccaacaccgacattaaactacccgacgacatggccaaacggttacacaaaatctgccgggaagcctaccccaaaaaccagcccaacaggcaccgaagcggatgggaccaatacgaaaaagactactacacggaggaaatactcttcctcaactccttcaacgtgccagccatcgacatgctcaaacgactcgacgtctcgtggacaatgtggaaacaaatcatcaccgaaaacaatctcacccggctccagcaagaaaccgacaacgcctgccaatgggcaaacctgcgaaaacagcaccccgacaaaacggatcaggaaatcacccagatgatgtacagtaaccaagtaacgttcagcaaggtgatgaaaaccatacccgcataaacacccacgacacccgcacagtatgtgcacactctttcacacataggagacatgatggtcaccaaaacccaacacgtgaccgacacaaacagggacaacaacgaccagctgccggagcatctacaagacgtcatgtgcggtaaaacactcaaccacacagacggaaccgtctcatggtgcacacgcaaaccaggacacgacggcgactgccgcacaggatggcagcccaccacacaacccctaggacatcatggcaaccaaaactgaaaccctcatccaacgctacggtgataaggctgccgacgtactcgccgacaggtccatacccgccacacagctagcccaaatgctcactgaagccggataccccatctccgccaccgttatcaaagactaccgccgcaaacaagccaacaccaccccgcaagaggaggaaaaccagtgatagacaacatagaccggctcctcacacaactagccaaccacgacaacgccatcgacaccatcgacgacaatctagccaacggcaccgtgcgccgcacacgcatctccgaatggaccttaccgaacggagaaaccggccgatccatacaaaaaataatcgaccaccaacccgcaaccgacccctaccccgtagacgaactcgtcaacaaactagccgaatggcagccaccaaaacccgaacaagacacccgcaccgactacagcactgcggccttcgtcatcggggcaggagacttccaaatcggcaaaggcatccccggcggagaaacatcacacttcgccgacaactatttacactccctcatagtcgcaaaacactactggcagcaagcaggcaaacccgaacgagtccacatagccttcctcggcgacatgatcgaaggatacgtgtcacaaggaggcaacaacgcctggcgcacccaaacacccctgacggaacaaatcaggctcacccgcatggccatgatgcaactcgtccacatgttcgaccactgcgccaacgtcaccatcacatccatccccggcaaccacggagaagccgtacgcttcggaaaaggagtcaccacctacgacgactccttcgatgtggactgctgccgcgccatcgcagaagcctaccagctcaacaaccaataccccaacctacacttccacttccccagccgagacgaaatgaccaccaccgttgatgtggcaggcacacaaatcctgcacgcccacggacaccaatggcgcaccggcaaacactacgaatggtggcgcggccaagaattccacaacggaaccacatcccacatcctgatggccgggcaccggcaccacctagaaatctccgagcaaggcacacgcaccttcatccaatgcccatccatggaaggagaatccacatggtatcggcaccgcacaggcaccaccggaaaccccggactcgtgtgctacactatcaacaacaaaacaccaaacaactaccagatagccaggtaatagtgccatgagcagacgaccaacaaaagcagacctagccaccaccgcatcgtgggtgtgggccacagaccatcatctacgcacactcaaccgggcatgcaccaaaacagccgcacactaccccgcaatcagcgcagacgacctctaccaagactccctactatatattgcagtgcgggaacaataccacaacctagacaacaaacactacaccaaaatgtgctacagggtagccaaacggctagccaacaaaaccatacaacacctagaccagccgaaacctttacccgatatcattcatctagccgacaaccaaaccagcatttaaaaggagaacacacaccatggtcacaaccatcctcgacgacggaacccaaaccaccaggatacaaacagtaggcgccaccaccaccgccatcatcaccaacacagaaacaccagaaaccatcaccgccaaatacaccatcagtaaagacggcacagccacctacagcatcagcggaaacacctatttgggagaccaccaacacattattaaactcatgtacgactactgccactgcgtcggacgattcgacaccaccaacaccagcaacccagacaacctcgacaacctattcaggggatgaccagtgaaccgaacctacaccaccgccgacatcatccaagccgcccaatggatctggaacggcggaccatggaaaccatcagtcgagccaggcatgccaccaccaccaaccgcgccacaacaccacggcaacaacatcgttaccatgatcgatttgcagctagccatcgacgactacaccctcacctgccagccatccaaacagcgaaaacatttggcacgcctggccgcattccgggaagtctacggatacgaccaaacatatgccacagccgcccaacgattgggtgtcacccggcaaaccgtgaaacagtgggcagaccaaacactcatcaccctaacaggctacgcaaacagtagatactatccagacgatagcgacgacagcacagggacgaaataaaaccatgaacaacacaaccaatatcacctacactgccctcaaaacagcggtacaccgaatcatccaacaacagcccaccaacatgaaccagctgcaaaacattgttgacagtgtcgaaaaccagtaccgtgtacacatctcactcgacaacgtgaaccttaccgtcaaagaagtcagcctcgacgatctcgctatcgaccaggacacgctagacgagtgcagcgaaatcttgtgggactgcgacagtgcaggatacccaaacaacagcaacacccgtggcattccagacgacacacgggcaagccaggaagccatagattggctcgccggaatcgcataccaaaccaaactactgcaagcggcggccgacgagatcatgcagtctatcatctgccaccgcgacaaccacaaaaatgttatcggccagaacgttctagaccaggccaacgatactatctccgcctgcctccacctggaccagctgatcgaagacacactagacgacaacctgtaaaactcctgtagacacaaaaatagtgccccagcggcaaccaccacacaatcgtggcagcaccgctggggcacacatctatattcacttatgcaacagtagactctaccgtcccaacctccgactcggctgcacgccgaggctcatagcctacaccaagatccgcatcctctgcaggctcgatcatgccaggatccgacacatccaccaagtgcggctcaaccaagcccccatcatccggtggaaccaaacccgcatccacaggcgtggttttaggtttgccggccacaaacgctgggctaccaaacgatgtagccaccgacaggactgcagccaccgttgctgttatcagggccgactcccacggcaaaccgcgaaacgactccgccgtataggtgacacccgccgtcacccccaacaccgcaacaaacgtttgaacaaaagtcttagccgcccgctccagtaaacctaaccaaaactgtttacccatcacacatcaccatcactttttcaaatcgttgacagcagactcgagcctgtcaatacggctacgacactccagcacgtaataccagacactccacaaagcgtcttttgtgcgccacagcttccccgtcaccggattcttcacccacgacagggcatcaacacgtttactcaaatcaccattctgaacctgaaccacaccaacatcatggtgcagcttattcaccgaaccactaagctgagcagacaattgtttaatctgatcatgcaaggctttcacatcagccaccgttaactcctcactacttgaaccgccgccgtggccattcaccacagccataaacttgtcccacggaaaccacggccccggatcgtcatgatccgactgatgccacgcatccgtcacatcagtgtgcccgcagatgccccgcctacccgctttcagatcggatacgctaagcttccttttcggaacaccatgcttgtcacacaactgccgacacaggatggcggcacgctccacagcgggccacaccctcgggtcaagccactgctccctcgtgtaagcatgccctggcacacggaacgaggcgtgcgaacccccatccgcgcaaatctctatacccaaactatgcggattcggcggggcatgccacccaatcgtagactccgacaagcactgcaccgtctccccaatatcacacacataatgggcagaaccacccgacgatggggaagcaaaatagtttgccgtggacaccgcccgccccttacgcgaggcagacggaaaccccacatccgggcatgtcgcatgaatcaccaccctattcaccggactattcgagccggccgagtgatgcgccgctggaatgtatctcaccacacaccaccaccaaacacaaccaacatcagtaacacccttcccttttcttttttacttgcgggatgacacggtaaccacaggtgatggtttcacactctcgcaggccaccgaacccgctatggtagaggccgtaccgtcactatatttcacaaccaggcggcccccggaacagtacaccgatatcaccgagcgcccatccttaccatctttaccatcggatccgttcgcaccggcagaaccctgcggcccctgaggccccacagggccacgctcaccctgtgcaccggctacaccagggggaccggcagggccacggccaccatcagccccatcagcgccatccctacctggcacgccatcccggccatcagccccgttcacaccggcaacaccatcatggccatccgaaccgttagcgccaggcaacccgtcaggacccttcacaccattcaaacccggggaaccctgcggaccaacagggccaaccagcccagccgaaccattaacaccatcccggccatcaacaccagcgggcccttgcgggccgcgctcaccggcaggacccggcacaccctgcacgctacgctcaacacgctgagcatccacacataagccagactggtgaagacgcaccgactcctgcccacccgaagcacacacccgcttcacacggctggccaaccctttagcggctgtaccattagactgggccctcgcctgctccgaatccctttgcgaagccacagacccgtaccgtaaagcacccgcagcaaccaccgccaacagcacaagcgacaggaacaacagtatcagggaagccttctcaaacgagcggcgctgccttttttcttcctccaactccctcacaattcaccccccaccaccatcaacagtatccttcaaaaactcgggcaaatcaggcatcttcaccggctcaacattctccggcagattcgcgttatagcggtgaacaatatggcgaatattccacgtgtactcttccatcgcatcaacctgcgcagacaactgcctaagcctcttcttcgacctgtacgtaacagcctgaatcgaaccaaggacagtagcgatagcggtacaaagagaggctacgagtgtgggtgtaaaccatgacactatagccccctacaactaaaaccaccacaacacgtcacataccagcaagccgcgcattacacgccgacagcaatccagttagccaccgcaggcaccccattcggcttagacccgtcattcgtgataaacgccaactgaaaatccttggcagtaacattgtaggctttcacatcaatctgctgcgtgcccccagccgccgtagccatagacgccaccaccacaggcggactactgaactggcgctcaaacgggatcgtgtaagcatacacagcagacccgccaaactggatctgcttagtgcccgtctcaatcctgggggacaacagcatccactcgttagcatggttagcccacacagcccccgaaggcaccatcacccggtcaccctccacaggggtaggatcacacgcagcagactcgccaaacgccaccctcgccgctatagcacgcctatccaactgctgctgcaacccgttagacgacaacaccaaagtagccagtagctgctgatggtacacgccaggctcagcccttaacacgtcacgggcacgctccgcacgccccccaggaacaatctccaacttggccgtattctgctcccaatcccgagacaggacaacatagtcgtatcgggtctcgccagggccaggcagctgccctgtcaccgtctcaacactattcgacgtgcacatcaccccgtgagcccaagcctgccccggcaaaacactacacaacaccgtggcaccctgaacagtagtgcccacacgaaaatcgtccgggcccttcacggacggcatattacccatcagaccagacatttgagcccaatcatactcggtcaacacaccatcaaaacccttgcacacaatacccacaacaaacccccaattcttttctaaaatttttgcaaatcccgcacacccgcagccaaatcagccacacggcgagccaacagggccgacggattatcctcataatcccccgcaataggagtcaccttcgtccacccgtcaccaggcgatacacactccacatcaatctgccgaacaatctccgcaataggccccgagcccacatccacatagatcaaatcacccggcatcagattgcctggcccaaaccgcaacacatccgactcagccaactcgatcttaaaccccgacgtggcccccgactcggacaacacccgctccgcctcatcaataagatgcacatgctcagaatccgtgttacgggcatccttaaacacctcgacacgatcaaaccactcatcctcggccaacgcgtcaaaatcctcacaaaacagccgatccttgccctcgccgcggccacccacaaccaccgccgtagccttcggggcgtcacgcacatactcccacgacacaatagacccagactcggcagtcaacacatggtcacgcgtcacagcaggcacacaatcaaacagtaaaccccgctgatcctgcttcacattctcaaactggttcaccgtgacagtcatccgagcccacgacaacaccggcaacaacttatcggcaaacacgtgaaaccgcgcctgaaaatccttaatatagcggccacgactcttatcatccaccataaatatatcaggcggaaaacgccaagtattatcccgcaacgccttcttagcgaccgactccgccgcacccgaatagtgggcataatccctattggcacgccactccatcccaatgatgctggaacgataaggcacaggccacaacagcatacgccacaacaggcggatatcatcctcacacgtgatagtcacccgcgaagaacgccaaggaccaacaccatgcacccgacgcacaggcccagaaaaaatctggccaccaccataatcaacaaccagccgtgcacccggcctagtcaatccttcaagcctggaatgatccccagacaccaccaactccaaagtggacaaaccattccacttcaacgacaacttcaacgactcaaaaaaattgataggcgccacacgacgataatccggcgtaaacaatgttatctgcggaacaagaccagccatcaaccattcaccaagccctcaaaaacctgtactgcaccgacacaacaatggcacccaaaccaaccatctcaatattcacactcttcgaaccgccaggcggaataggcgcaaactcccactctgtcaaacgatccatcacatcctcaaacccgttcaacaacgccgactgctggcgaggatccgtgtcaatagtgatccaatcatactcctcgacaggataatccgaagacacacgcaaaccatcaatctgcacagaccacgactccaaaggaccctcaacacgaatcacaggccacgcaggcacatcacccttattagacagattatcccaacccgaaccaacaccaggcgtcaacaccacaggaaacgccgtgccatccttgccgacagggccgccacccaaccaatcctgcaacttcgcgttactaaaacgaaacttttgctcatccccataccaaaacgggtcataggccgtcaaatgaatcacataacgcgcataacccctgttcaccggatccaccgtaaacgtgtcatcaaccgaatcaaaccggcattttagcacacgctcacgaccggcaggagtcttcacagacaactccccctcctccccgggaggaaaagcagaccacaacgcgtcataggctttcaaaaaaccgtcacgaaacccgccatcaggatccggatccacacccgacaccaacaccggcagcgtcacctcgcgaggcttcacattaaacccgcgccactccgagccgtgcaccccaacatgcgtttgagaaaaatgctccacctcaggaacacccaaaccgcgcaacgaatcattcaacaacatcaccggagacgaccccgtataatccgtcaaatgaagcacacgctccccaccaaacagcggatccatagaccaggtcacagtcaaaccagaacgatcagacgggtcaggaataaacatgcatacccctttactcacatataagccaacgcgttcaaagcgtcacgctgctgccgctcaatccgcttcgcaaactcggcaggatcaccatacgtcgggccattcacattcaccacaacactcttatcattctcacgccgataccggtcatacggggtaaacgagcccacagacgatcgcacaccaaaccgggcatcaacagcatccggaagctgcgaagcaacacccgacatcgcatccaacgccaaaccagcattaccagtaataccctcagccaaaccggcaacaacctgccggccaacctcgtcacgaaacaccctagacggggaatgaatacccagagcagacttcgcagcattagcaatctgggaacccatgttacgcaccgtatccaacaggccactcatagcattcttaataccgttacccaaaccggcaacaacattatggccagcagacaccaacagggaccccatgttacccagggcgcccctaatattgctgggcagattccggaaaaaacctatcacactatgcacaccactagacacagccgagcccatagcgtgcatagcagaagaagccgcacccctcgcagcgttaaacccggacgaggcagcaccacgaacccgagaagccatcgacccgaaaaatccgccaacagcggacgccaccgaagacacaacactccggatagcattcatcgcagaagaaacagcgccacgagccgcgttaaaaccagacctcacatgggaggcaaccgaagaacccagccgggcaaaaaaccccacaaccgcgttcacgccgccagaaatcaccgacttgaaaccattaataaacgcagacgtaaacgccctaatatgattccagccagcctgaaccaccgaacccatacgcgccaaaccagacacaaaatgggcaacaacccacgagatgacacgggcaacagcggcaataacacgggccacagccgacacgacagcaccaacaatacgggcaacaaacccgaccacggccgccaccatcggagccacaacagcaagaatacgggccaccacctgtatcacaaccgcaacaacctgaaccaccacacgcataacagacatgatgactggtatcaacgaccggatcaggccaataatcggtggcagcacagacatgacagcacccaaaatctgttgaatcaccggcatcaacaccggcaccagttgcatgatcacgccaacaacctgacgtatcacagccacaacagcctgcaacaccggcataagcgcaggcagcaacattgcagccacctgcgtcaccgcaccaataatctgcgtgatcacaggaaccagctgggcaaccagcatactaaccaaaggcataagctgcgcagctagcccggcaaccaaaccgataatctggccaaacactggcgccaaccgtgccaccaaaccagcaaccaaacccaacagcggctgcacagcggccatgatctggcccaacgcctggccaaccacagccacaagctgcatcaccgcggcacggaactgggcgttcgtggcaaacatggcagcaaacaagccgatcacaatcccgacagggccacccaaggcgcgaaacacgccgccaagcccgccagccgcacccctcaaagcaccaaacgacggcaacaaattcttcaacgacaccgccaacggggcaaaccccgcaacaagcttccccacaccggcagcaacaataccaaacactgcggtgccgccagcaaacatggcagccaaattcactttaggaacaggcaaatgcattctcgcaaaaatgcccttcaactgctccaccttggcgcgcatctgtgcattcattcgagtgatcatgcccggcatacggttaatccacgccaaaatagacggcatcatccgctgaatcccctgatccaccgacgcaaacaaaggcttcacagactccgtgatagacttaataaccggattcaacgcaacaaaaatctgcctcaggccgttaagaaacggcgccatagccgtagcacccaaataacccagggcgctcttaacattcttcatagcgccctcaaacgtcttaccagacgcctgcgcagcaccacccatgccaagcttcatcgcagccgcaaacgtgttaaaatcaatctgccccttcgacaccatctgcgacacctcagcagacgttttacccgtctgcctggcaagcaaagacagcacaggaacacccgccatcgtaagctgcaacatgtcatcgccctgcaacttaccgcgagccatcacagacgtaaaaatagcgcccgtatcctgaaacgacttaccagaaatataagacacatcggcgacagtcttcaacacatccgtcatctgcccgccagacttcacacccgaagcagacaacgccgcagccgtagacgccgcatcacccaacgcatacgacgtaccagtcacagcctcaatagccgaattcataatcgaagacgtgtcagacgacgtgtgacccaaaccagtcagtttagcctgagcctcatcaatagccatcgccctagctataccgccaccaatagtcacatcataaatcgacttgaggcccttcttagcaacattgatggcgcccaccattgcggcaccaccaagcgccaacttcatacccttagcaaacaaactacccgaacgctgaccctccgcaggcatcaccccagaaagctgtttaccaacatcacttttaaggccaggcatcttcgtatacaacgacacatatgcggaagcaatctcaccagacatacactattcaccccataatattaatctcgcgagacatcccgccaccggcgcgaacacgcgccaaaatatcgtccacctgcccagacgtaaaccgggcc

SEQ ID NO: 7 - DNA, 29780 bp, Propionibacterium acnes bacteriophage
catcacacccgtcagccgaggaggactcaacaccctcgacaacgggcaaatcatctgcagaacatgcaacagaagcaaaggcaatcgcagcgaaccaaacattagtctccaacaacaaaccacaaaaaccctgatcccatggtgaaaaaacccacaaaccccacgggaaccaccccctgcacacccgtgcaagaccacgtacggcttagtgaaatacctcccttttgtggttttgtctgtttgtcgactttttgtgttggtggtgagtgttgtgcagcctgagcttcctgggtctcgtgattggtgtggggagacgcgtcgttggtggcgtgtgtggggtgaggatccgcgtgcgcagtatgtgtctgatgaggagtggttgtttcttatggatgctgcggtgattcatgattgtgtgtggcgtgagggtcgcgcggaccttgtggcttcgcttcgtgctcatgtgaaggcttttatgggcatgttggatcgttattcggttgatgtggcgtctggtggccgtggtgggggttctgcggtggcgatgattgaccggtataggaagcgtaaaggggcctaatgtcgagtgttgttggttctcaggttcctcgtcaccgggtggctgcggcgtattcggtgtctgctggcggtgatgctggggagttgggtcgtgcttatgggttgacgcctgatccgtggcagcagcaggtgttggatgattggcttgctgtgggtggtaatggcaggcttgcttcgggtgtgtgtggggtgtttgtgcctcgccagaatggcaagaatgctattttggagattgtggagttgtttaaggcgactattcagggtcgccgtattttgcatacggctcacgagttgaagtcggctcgtaaggcgtttatgcgtttgaggtcgttttttgagaatgagcggcagtttcctgacttgtatcgtatggtgaagtcgattcgtgcgacgaatggccaggaggctgttgtgttgcatcatccggattgtgccacgtttgagcgtaagtgtggctgtccgggttggggttcggttgagtttgtggcccgtagccggggttcggctcgcggttttacggttgatgatttggtgtgtgatgaggctcaggagttgtcggatgagcagttggaggctttgcttcctacggtgtctgcggctccttcgggtgatccgcagcagatttttttgggtacgccgccggggccgttggctgacgggtctgtggtgttgcgtcttcgtgggcaggctttgtcgggtggtaaacggtttgcgtggacggagttttcgattcctgacgagtcggatccggatgatgtgtcgcggcagtggcggaagttggcgggtgacactaatccggcgttggggcgtcgcctgaatttcggtacagtctcggatgagcatgagtcgatgtctgctgccgggtttgctcgggagcggcttggctggtgggatcgtggccagtctgcttcgtctgttgttccggctgataagtgggtccagtctgcggtggatgatgcgagtttgtctggcgggaaggtttttggtgtctcgttttctcgctcgggggatcgtgtcgcgttggcgggtgctggccggactgatgctggggttcatgttgaggttattgatgggctgtcggggacgattgttgatggtgtgggccggttggctgactggttggcgttgcgttggggtgacactgaaaagatcatggttgccgggtctggtgcggtgttgttgcagaaggcgttgacggatcgtggtgttccgggccgtggcgttgtggttgctgatactggggtgtatgtggaggcgtgtcaggcgtttttggagggtgtgaggtctgggagtgtttctcatcctcgtgccgattcgaggcgtgacatgttggatattgctgtgaggtcggctgtgcagaagaagaagggttctgcgtggggttggggttcctcgtttaaggatggttctgaggttcctttggaggctgtgtctttggcgtatcttggtgcgaagatggcgaaggctaggcggcgtgaacggtctggtaggaagcgggtgtctgtggtatgaactcggatgagttggctctgattgagggcatgtacgatcgtattcaaaggttgtcttcgtggcattgtcgtattgagggctactatgagggttctgcccgggtgcgtgatttgggggttgctattccgccggagttgcagcgtgtgcagactgtggtgtcgtggcctgggattgcggtggatgctttggaggagcgtctggattggcttggctggacgaatggtgacggctacggcctggatggtgtgtatgctgcgaatcggcttgctacggcgtcgtgtgatgttcaccttgatgctctgatttttgggttgtcgtttgttgcgatcattccccaagatgatgggtcggtgttggttcgtcctcagtctccgaagaattgtactggccggttttcggctgacgggtctcgtttggatgctggccttgtggtgcagcagacgtgtgatcctgagattgttgaggcggagttgttgttgcctgatgtgattgttcaggtggagcggcgtgggtctcgtgagtgggttgagacgggccgtataccgaatgtgttgggtgctgttccgttggtgcctgttgtgaatcgtcgccgtacgtcgaggattgatggccgttcggagattacccgctcgattagggcttacacggatgaggctgtgcgcacgctgcttggccagtctgtgaatcgtgacttctacgcctaccctcagcgttgggtgacgggtgtgtcggctgacgagttttcgcagcctggctgggtgttgtcgatggcttctgtgtgggctgttgataaggatgatgatggtgacactccgaatgtggggtcgtttcctgtgaattctcctacaccgtattcggatcagatgcgtttgttggcgcagttgacggcgggtgaggcggctgttccggaacgttatttcgggtttatcacgtctaacccgccttcgggtgaggctttggctgcggaggagtctcggcttgtgaagcgtgccgagcggaggcagacgtcgtttggtcagggctggttgtcggttggtttcttggctgcccgggcgttggattcgagtgttgatgaggccgcgttttttggtgatgttggtttgcgttggcgtgatgcttcgacgcctaccagggcggctacggcggatgctgtgacgaagcttgtgggtgccggtattcttccggcggattctcggacggtgttggagatgttgggtttggatgatgtgcaggttgaggctgtgatgcgtcatcgtgccgagtcgtcggatccgttggcggcactggctggcgctatatcccggcagacgaacgaggtttgataggcgatggcttcgggtgctgtgtcgaggcttgctgcgactgagtatcagcgtgaggcgatccgttttgctgggaagtatgcgggctattatgccgagcttggtcgtttgtggcattccgggaagatgacggatgcgcagtatgtgcgtttgtgtgtggagttggagcgtgccggccatgatggttcggcgtcgttggctgccaggtttgtgtcggattttcgccggttgaatggtgtggatcctggtttgatcgtgtatgacgagtttgatgctgccgccgcgttggctaggtcgttttcgactatgaagattcttcagagtgacccggatagggcgaatgatacgattggtgcgatggcggcgggttttaatcgtgctgtgatgaatgctggtcgtgacacggttgagtggtctgcgggtgcgcagggtaggtcgtggcgcagggtgactgatggtgatccgtgcgcgttttgtgccatgttggctacgaggtcggattatacgactaaggagcgggcgcttactactggtcatactcggcgtcataagcgtgccggtaggcgtccgtttggttcgaagtatcatgatcattgtgggtgtacggtggttgaggttgttggtccttgggaaccgaatagggctgattccgcatatcagaggacgtatgagaaggctcgtgagtgggttgatgatcacgggttgcagcagtcgcctggcaatattttgaaggctatgcgtactgttggcgacatgagatgatggtttccggttgtgtgccgccggttatcggtgcacagggttgtctcccgcacgggggtcaacaatgttgtgttgttttccgcaaggagtatagggttaggctatggccgatcaaaaagttgaagaacagaatgttgacaatgatgctgttgagcccggaaagggtggagacattgttgatgttgtgaaggatgggcaggctgccggcgatgatcatgccggtgatgtttccgtgaaggaggagtcttcttctggcacggattggaaggctgaggctcgtaagtgggagtctcgtgctaaaagtaatttcgccgagttggagaagcttcgcgcctcggatggtgatgcggggtctgtgattgatgatcttcgccgcaagaatgaggaactcgaagaccggattaatgggtttgttctggagggtgtgaagcgtgaggtggctgccgagtgtggcttgtcgggtgatgctgtggctttcttgcacggtggcgatcgtgaagcgctggtggagtctgctaaggctttgaagggtttgatcgaccagagtggtggtggcgcgggtgtgcgccgtcttgcggggagtgcccccgttgatgatgttaaacgacgtgagggtgtcgcgtttgtggatgctcttgtcaataattctaggagatgatttctgatggctgacgattttctttctgcagggaagcttgagcttcctggttctatgattggtgcggttcgtgaccgtgctatcgattctggtgttttggcgaagctttcgccggagcagccgactattttcggcccggtgaagggtgccgttttttctggtgttcctcgcgcgaagattgttggtgagggtgaggttaagccttccgcatcggttgatgtttcggcgtttactgcgcagcctatcaaggttgtgactcagcagcgtgtgagcgacgagtttatgtgggctgacgcggattaccgtctgggtgttttgcaggatctgatttcgcctgctcttggtgcttcgattggtcgcgccgtggatctgattgctttccatggtattgatcctgccacgggtaagcctgctgcggctgtcaaggtgtcgctggataagacttcgaagacggttgatgcaaccgattccgctacggctgatctggttaaggctgtcggcctgattgctggggctggtttgcaggttcctaacggtgttgctttggatccggcgtttgcttttgctctgtctactgaggtgtatccgaaggggtctccgcttgccggtcagcctatgtatcctgccgccgggtttgctggcctggataattggcgtgggctgaatgttggtgcttcttcgactgtttcgggtgccccggagatgtcgcctgcctctggtgttaaggctattgttggtgatttctctcgtgttcattggggtttccagcgtaacttcccgatcgagctgatcgagtatggtgatccggatcagactgggcgtgacttgaagggccataatgaggttatggttcgtgccgaggctgtcctgtatgttgcgattgagtcgcttgattcgtttgctgttgtgaaggagaaggctgcaccgaagcctaatccgccggctggtaactgatacaagataagcgaatgtgtactgtgtgcagggggtggtgttgatgggtatcattttgaagcctgaggatattgagcctttcgccgatattcctgaggggaagcttgaggcgatgattgctgatgtggaggctgtggctgtcagtgtcgccccctgtatcgctaaaccggatttcaaatatagggatgccgctaaggctattctgcgcagggctttgttgcgctggaatgataccggggtttcgggtcaggtgcagtatgagtctgcgggcccgtttgctcagactacacggtcgaatactcccacgaatttgttgtggccttctgagattgctgcgttgaagaagttgtgtgagggtgatggtggggctggtaaagcgttcactatcacccccactattaatggtcgatatgcacattctgaggtgtgttccacggtgtggggtgagggttgttcgtgcggatctgatattaacggctacgctggccctttgtgggagatatgatatgaccggttttccttacggtgaaacggttgtgatgcttcagccgactgttcgtgtcgatgatcttggtgacaaggtggaggattggtctaagcctgtcgagactgtgttccataacgtggccgtttatgcttctgtgtcgcaggaggatgaggctgccggccgtgactcggattatgagcattggtcgatgctgtttaagcagcctgtcaagggtgccggttatcgttgccggtggcgtattcggggtgttgtgtgggaggctgacgggtctcctattgtgtggcatcatccgatgtctggttgggatgctggtacgcaggttaatgtgaagcgtaagaagggctgatgggttgtggctcaggatgtgaatgtgaagctgaacttgcctggtattcgtgaggtgttaaagtcttctggggtgcagggcatgttggctgagcgtggcgagcgtgtgaggcgtgcggcctcggcgaatgtgggcggtaatgcgtttgatagggcccaataccgtaatggtttgtcgtcggaggtgcaggttcaccgtgttgaggctgtggcccgtattggcaccacatataagggtggtaaaaggattgaggcgaagcatggcacgttggcccggtcgattggggctgcgtcgtgatcgtttacggtgaccctaggaagtgggctaaacgtgtcctggcggatgatggctggctgtccgatataccgtgtacaggtacagtacccgacgatttcacgggtgacttgatttggttggctcttgatggtggcccgcagttgcatgttcgtgagcgcgtgtttttgcgcgtgaatgtgttttctgatatgccggatcgtgctatgtctttggctcgtcgtgttgaggctgtgctggctgatggtgtggacggtgacccggtggtgttttgtcggcgttctactggccctgatcttttagtggatggtgcacgttttgatgtgtattcgctttttgagctggtgtgcaggcctgtcgaatccgagtaagtgtatcgttgttttttagtttgattgttttgtagttgaatattttttgggggttatgatggctggaacacgtacagcgtctaatgttcgctctgctgttacgggtgacgtttatattggtgacgctcatgcgggtgattctattaagggtgtggaggcggttccttctgggctgacagctttggggtatctgtcggatgacgggtttaagattaagcctgagcgtaaaacggatgaccttaaagcctggcagaatgcggatgttgttcgcactgtggctacggagtcgtctatcgagatttctttccagctgatcgagtcgaagaaggaggttatcgaattgttttggcagtcgaaggttactgccggatccgattcgggttcgttcgatatttctcctggcgccactactggcgtgcacgccctgttgatggatattgttgatggggatcaggttattcgctactatttccctgaggttgagttgattgatcgtgacgagatcaagggcaagaatggcgaagtgtacgggtatggtgtgacgttgaaggcttacccggcccagattggtaagactggtgatgctgtgtctggtcgggggtggatgacggctttaaaagctgatactcctccgactcctcctccggccccggttcctccgaagcctcagccggatccgaatcctccggctggtaactgatacacgattttaggggattgttgatagatgagtgacactggttacacgttgaagattggtgaccgtagctgggtgttggcggatgctgaggagacggcgcaggctgttcctgcccgcgtgtttcgtcgtgccgccaggattgcccagtcgggggagtctgcggatttcgcccaggttgaggtgatgttttctatgttggaggctgccgccccagcggatgctatagaggctttggaggggcttcctatggttcgtgtggcggaggttttccgtgagtggatggaatacaagcctgacggtaagggtgcctcgctgggggaatagtttggctccacggcctgattgatgattatcgtggggccatcgaatacgatttccgcaccaagtttggtgtttctgtttatagtgttggtggcccgcagatgtgttggggtgaggctgtccggctggctggcgtgttgtgtactgatacgtctagccagttggcggcccacttgaatggttggcagcgcccgtttgagtggtgtgagtgggctgtgttggacatgttggatcattacaggtctgctaatagtgaggggcagccggagcctgtggcgaggcctacggatgagcgtagggcccggtttacgtctgggcaggtggacgatattttggcgcgtgttcgtgccggtggcggggtgtctcgcgagattgatgtgttggggtgaatagtgtatgtctggtgagattgcttccgcgtatgtgtcgttgtatacgaagatgcctggccttaaaagtgatgttggtaaacagttgtctggggtgatgccggctgagggtcagcgttcgggtggtctgtttgctaagggcatgaagttggcgcttggtggtgcggcgatgatgggcgccatcaatgttgctaagaagggcctcaagtcgatttatgatgtgactattggtggcggtattgctagggctatggctattgatgaggctcaggctaagttgactggtttgggtcacacgtcgtctgacacgtcttcgattatgaattcggctattgaggctgtgactggtacgtcgtatgcgttgggtgatgcggcttctactgcggcggcgttgtctgcttcgggtgtgaagtctggcgggcagatgacggatgtgttgaagactgtcgccgatgtgtcttatatttctggtaagtcgtttcaggatacgggcgctatttttacgtctgtgatggctcgcggtaagttgcagggcgatgacatgttgcagcttacgatggcgggtgttcctgtcctgtctttgcttgccaggcagacgggtaagacgtctgctgaggtgtcgcagatggtgtcgaaggggcagattgattttgccacgtttgcggctgcgatgaagcttggcatgggtggtgctgcgcaggcgtctgggaagacgtttgagggcgctatgaagaatgttaagggcgctttgggctatttgggtgctacggctatggcgccgtttcttaacgggttgcggcagatttttgttgcgttgaatccggttatcaagtctatcacggattctgtgaagccgatgtttgctgccgtcgatgctggtattcagcgtatgatgccgtctattttggcgtggattaatcgtatgccggctatgatcactcgaatgaatgcgcagatgcgcgccaaggtggagcagttgaagggcgtttttgcgagactgcatttgcctgtccctaaagtgaatttgggtgccatgtttgctggcggcacagcggtgtttggtattgttgctgcgggtgtggggaagcttgtcgcggggtttgccccgttggcggtgtcgttgaagaatctgttgccgtcgtttggtgctttgaagggtgccgccggggggcttggtggcgtgtttcgtgccctgggtggccctgttggtattgtgatcggcttgtttgctgccatgtttgctacgaacgcccagttccgtgccgctgttatgcagcttgtgggggttgttggccaggcgttggggcagatcatggtcgctattcagccactgttcgggattgttgctggcgtggtggcccggttggctcccgtttttggccagattattggtatggttgccggtttggctgcccaactggtgcctgttattggtatgcttattgcccggctggttcctgttatcacccagattattggtatggtaacccaggttgctgccatgttgttgcctatgctgatgccggttattcaggctgttgttgctgtgatacggcaggttattggtgtgatcatgcagttggtgcctgttttgatgccggttgtgcagcagattttgggtgctgtcatgtctgttttgccgccgattgttggtttgatccggtcgctgataccggtgatcatgtcgattatgcgtgtggtggtgcaggttgttggtgccgtgctacaggtggtggcccgtattattccgattgttatgccgatttatgtttcggtgattggattcattgctaagatttatgctgcggttatcgtttttgaggctaaggttattggcgctattcttcgtaccattacgtggattgtgaatcattcagtgtctggcgtgaggtctatgggtacggccatcttgaatggctggaatcatataaaatcgtttacgtctgcgtttattaacggtttcaagtcggttatttctggcggcgtgaacgcggttgtggggttttttgcccggcttggttcttcggttgcttctcatgtgaggtctggttttaacgcggctcgtggcgctgtttcttctgcgatgaatgctatccggagtgttgtgtcttcggtggcgtctgctgttggcggttttttcagttcgatggcgtctagggttcgtagtggtgctgtgcgcgggtttaatggtgcccggagtgcggcttcttctgctatgcatgctatggggtccgctgtgtctagtggtgtgcatggtgtgctgggttttttccggaatttgcctggcaatattcggcgtgcgcttggtaatatggggtctctgttggtgtcggctggccgtgatgtggtgtctggtttgggtaatggtatccggaatgctatgagtggcttgttggatactgtgcgtaatatgggttctcaggttgctaacgcggcgaagtcggtgttgggtattcattccccgtctagggtgtttcgtgacgaggttggccggcaggttgttgccggtttggctgagggtattactggtaatgcgggtttggcgttggatgcgatgtctggtgtggctggtcggctgcctgatgctgtggatgcccggtttggtgtgcgatcgtctgtgggctcgtttaccccgtatggcaggtatcagcgtatgagcgagaagagtgttgtggtgaatgtgaatggacccacgtatggtgatcctaacgagtttgcgaagcggattgagcggcagcagcgtgacgcgttgaacgcgttggcttacgtgtgattgggggtgtggttcatgtttcttcctgacccgtctgatcgttctggtttgactgtgacgtggtctatgttgccgttgattggtaatgatccggagcgtgtgcttcatttgacggattatacgggtgcgtctcctgtcatgttgttgaatgattcgttgcgtggtttgggtgttcctgaggtggagcatttttctcaaactcatgttggggtgcacggctcggagtggcgcgggtttaatgtgaagcctcgcgaggtgacgctgccggtgttggtgtcgggtgttgacccggatccggccggcgggtttcgtgacggttttttgaaagcctatgacgcgttgtggtctgcgtttcccccgggcgaggtgggggagttgtcggtgaagactcctgccggtcgtgagcgtgtgctgcggtgtcggtttgattcggtggatgacacgtttacggttgatccggtgaacaggggttatgcgcgctatctgttgcatttgacagcgtatgacccgttttggtatggggatgagcaaaagtttcgttttagtaacgcgaagttgcaggattggttgggtggcggccctgtaggcaaggatggtactgcgtttcctgtggtgttgacgcctggtgttggttcgggttgggataatctgtctaataagggtgatgtgcctgcgtggcctgtgattcgtgttgagggtcctttggagtcgtggtctgtgcagattgatggtttgcgtgtgtcttctgattatcctgtcgaggagtatgattggatcactattgacacggatcctcgtaaacagtctgcgttgttgaacgggtttgaggatgtgatggatcgtttgacagagtgggagtttgcgcctatcccgcctggcggttctaagagtgtgaatattgagatggttggtttgggtgccattgttgtgttggtgcagtacaggtttttgagggcttggtgaacggttgtggctggtcttgttccgcagataacattgtttacgtcggattatcaccgggtggcgcctatcaatttttttgagtcgttgaagttgtcgttgaagtggaatggtttgtcgacgctggagttggtggtgtctggtgatcattccaggcttgacgggttgactaggccgggtgcacggctggttgttgattatggtggtggccagattttttctgggcctgtgcgtaaggtgcatggtgtgggtccgtggcgttcttcgcgtgtcacgatcacgtgtgaggatgatatccgcctgttgtggcgtatgttgatgtggcctgtgaattatcgtcctggtatggttggtatggagtggcgtgcggaccgggattatgcccactattcgggtgcggctgagtcggtggctaagcaggtgttgggggataatgcttggcgttttccgcctggtttgtttatgaacgatgatgagagtcgcggccgctatattaaggattttcaggtgcggtttcacttgtttgcggataaattgttgccggtgttgtcgtgggctcggatgactgtcacggtgaaccagtttgagaatgcaaagtttgatcagcggggtttagtgtttgattgtgtgcctgctgtgacccggaagcatgtgttgactgccgagtctggttcgattgtgtcgtgggagtatgtgcgtgacgccccgaaggctacttcggtggtggttggtggccgcggcgagggtaaggatcggctgttttgtgaggatgttgattcgatggccgaggatgagtggtttgatcgtgtcgaggtgtttaaggatgcccgtaacacggattctgaacatgtgcatctcatcgatgaggctgagcgggtgctgtccgagtcgggggccacgtcggggtttaagatcgagttggctgagtcggatgtgttgcggtttgggcccgacaatctgatgccgggtgatttgatctatgtggatgtgggttctggccctattgcggagattgttcggcagattgatgtggagtgtgattcgcctggtgatggttggacgaaggtgactcctgttgcgggggattatgaggataatccgtctgccctgttggctcgccgtgtggctggtttggctgcgggtgtgcgggatttgcaaaaattctagaaaagatgaggggtttgttgtgggtattgtgtgtaaagggtttgatggtgtgttgaccgagtatgattgggctcaaatgtctggtctgatgggtaatatgccgtctgtgaagggcccggacgattttcgtgtcggcactactgttcagggtgccacggtgttgtgtgaggtcctgccggggcaggcttgggctcacggggtgatgtgcacgtcgaatagtgttgagacggtgacagagcagcttccgggcccgggtgagacccgctacgactatgtggtgttgtctcgggattggcaggagaatacggccaagttggagattgttcctggggggcgtgcggagcgtgcccgtgacgtgttgcgtgcagagcctggcgtgtttcatcagcaactgttggcgactttggtggtgtcgtctaacgggttgcagcagcagctggataggcgtgctatagcggctagagttgcgtttggggagtctgctgcgtgtgatcctaccccggtggagggtgaccgtgtgatggttccttcgggggctgtgtgggctaaccatgcgggcgagtggatgttgttgtctccgcgtattgagacgggttcgaagtcgatcatgtttggcggttctgctgtgtatgcttacacgatccagtttgatcgccagtttgctagtgcgcctatcgtggtggcgtctatggctacggcggcggggggcacgcagcagattgatgtgaaagcctacaatgtgactgccaaggattttagtttggcgtttattacgaatgatggttctaagccgaatggtgtgcctgcggttgctaactggattgctgtcggcgtgtgaccgggctgttgttgtggcggatgtggtaatgttggggggctgtggtgtcgtggtttactcctgcactggtggcctctatttgtaccgcgttggccacggttttgggttctgttcaggcggtcacatctagatcgaggaagcgtttgcgcaggctgtcggctcaggtggatgcgatggaagagtatacgtggggtgtgcggcgcgaggtgcgaaggtttaacgccgggcttcctgacgatgtggagccgatgcatcttcctgatttgcccgagtttttgaaagatactgttgatggtggaggtgagtagggttgagggagttggaggaggagaagcggcagcgccgcaattttgagaaggtttcactggtgttgttgtttttgtcgcttgtgctgttggcggtggttgctgcgggtgctttgcgtttcggagctgtatcctctgagcgggattcggagcaggcgagggcccagtctaatggtacggcggctaaaggtttagccagccgtgtgaagcaggagtgtacccagggtggcgtggagtcggtgcggcttcacaggtctggcttgtgtgtggatgctgtgcgtgttgagcggagtgtgcagggtgtgcctggccctgccggtgagcgcggcccgcagggcccgcaggggccggctggtgttgatggttcggctgggctggttggccctgttggtccgcagggttcccctggtttgaatggtgtgaaaggtcctgacggattgcctggcgctaacggttcggatggccatgatggtgttgcgggtcatgcaggtgctgatggtcgggatggttcggccggtgagcgtggtgatgtgggcccttcgggtcctgccggcccgcaaggtgcacagggtgaacgtggtgagcgtggccccgccggtgcgaacggatccgatggtaaagatggcaaggatggcgctgatgggcgctctgttgtgtctgtgtactgttccgggggccgccttgttgtgaaatatagtgacggtgcggcgtccacgatatcgggttcggtggcctgccagggtgtgaaaccgtcgcctgtggttactgtgtcatcccgcaaatagaagaagagggaagggtgttactgatgttggtcgtgtttggtggtggtgtgtggtgagatacattcctgcagcgcatcactcggccggttcgaatagtccggtgaaccgggttgtgattcatgcaacatgcccggatgtggggtttccgtccgcctcccgtaaagggcgggcggtgtctacagcaaactattttgcttccccatcgtctgggggttcggcgcattatgtgtgcgatatttcggagactgtgcagtgcttgtcggagtctacgattggttggcatgccccaccgaatccgcatagtttgggtatagagatttgcgcggatgggggttcgcatgcctcgttccggataccggggcatgcttacactcgggagcagtggctggatcctagggtgtggcctgccgtggagcgtgccgcggtgctgtgccggcagttgtgtgacaaatataatgttccgaaaaggaagcttagtgcagccgatttgaaggctggcaggcggggtgtgtgcggccacgtggatgtgacggatgcgtggtatcagtcggatcatgacgatcctgggccgtggtttccgtgggacaaatttatggccgtagtctgcggcggtagtggtagtgaggagttaactgtggctgatgtgaaagccttgcatgatcagattaaacaattgtctgctcagcttactggttcggtgaataagctgcaccatgatgttggtgtggtacaggtacagaatggtgacttgggtaaacgtgttgatgccctgtcgtgggtgaagaatccggtgacggggaagctgtggcgcacaaaagacgctttgtggagtgtctggtattacgtgttggagtgccgtagccgtattgacaggctcgagtctgctgtcaacgatttgaaaaagtgatggtggtttgttgtgggtaaacagttttggttgggtttgctggagcgggcggctaagacttttgtgcaaacgtttgttgctgtgcttggggttactgcgggtatcacttatactgcggagtcgtttcgcggtttgccgtgggagtctgccctgataacagcaacggttgctgcggtgttgtcggtggctacatcgtttggtagcccgtcgtttgtggccggtaagccgaatgtgacaccggttgtggatgcgggtttggttccaccggatgacaggggattggttgagcctcacatggtggatgtgtcggatcctggcatgatcgagccgacggatgatgctgatattgccggctatgtgcctcggcgtgctgccgagtcggaggttggcacggtagagtctactgttgcataagtgaacatgtgtgtgccccagcggtgctgccacgattgtgtggtggttgccgctggggcactatttttgtttatgcggtgtggctatgattcgttgctgtcgatggtgtcttcgagcatctggtacaggtggaggcaggtagagatggtttcgctggcctggtttagaacggttcggccgataacgtttttgtggttgtcgcggtggcggatgatagcccacatgatctcgtcggccgacgattgtagtagttttgcctggtatgcgattccggcgagccagtctagtgcttcctggcttgcataggggctctggtcctcgctgttgcttgtggggtgtcctgcactgtcgcataaccacaggatttcgctgcactcgtctagcgtgtcctggtcgatagcgagatcgtcgaggctgacgtcgttgacggtaaggttcacgttgtcgagggagatgggtacaccgtactggttttcgacactgtctacaatgttttccagctgttgcatgttggtgggctgttgttggacgatacggtgtatcgctgtgttgagggtggtgtaggtgatgttgtgtgtgttgttcatggttttattccatccctgcgctgtcgtctggatagtatcgactgttggcgtatcctgtgagggtgatgagtgtttggtctgcccactgtttcacggtttgccgggtgactccgagtcgttgggcggctgtggcgtaggtttggtcgtatccgtatacttcacggaatgctgccagccgtgccaaatgttttcgctgtttggagggttcgcaggcgagggtgtagtcgtcgatggctagctgtagatcgatcatggctacaatgttgttgccgtggtgttgtggcgcggttggtgggggtggcattcctggctccacgctcggtttccatgggccgccgttccagatccattgtgcggcttggatgatgtctgcggtagtatatgtttggttcactggtaatccttaaacaggtcgttggtgttgctggtgtcgaatcgtccgacgcagtggcagtagtcgtacatgagtttgataatgtgttggtggtctcccaaataggtgttgccgctgatgctgtaggtggctgtgccgtctttcgctatggtgtatttggcggtgatggtttcggggttttcggtgtcggtgatgatggctgtggtggtggtgcctactgtttggagcacggtggtttgggttccgtcgtcgatggtggttttaaccatggtgtgtgttctcccttgttgttagttgctggtttggttgtcggctagatgaatgatatcgggtaagggtttcggctggtcgaggtgttgtatggttttgttggctaaacgtttggctaccctgtaacacattttggtgtagtgtttgttgtctaggttgtggtattgttcccgcaccgcaatatatagtagggagtcttggtacaggtcgtctgcactgattgcggggtagtgtgtggctgttttggtgcatgcccggttgagtgtgcgtagatgctggtttgtggcccacacccacgatgcggtggtggctaggtctgcttttgttggtcgtctgctcatagtatctctttcatctggctatctggtagttgtttggtgttttgttgttgatagtgtagcacacgagtcctgggtttccggtggtgcccgtcttgtgccggtaccatgtggattcgccttccatggatgggcattggatgaaggtgcgttgtccttgctcggagatttctaggtggtgcctgtgtccggccatgagaatgttggatgtggtgccgttgtggaattcttggccgcgccaccaatcatagtgtttgccggtgcgccattggtggccgtgggcgtgcagtatccgtgtgcctgccacgtcgacggtggtggtcatttcgtctcggctggggaaataaaagtggaggttggggtagttgttggtgagctggtaggcttctgcgatggcccggcagcagtccacgtcgaaggagtcgtcgtaggtggtgacgccttttccgaatcgtacggcttcgccgtggttgccggggatggatgtgatggtcacatttttgcagtggtcgaattggtggatgagttgcatcatggccatgcgggtgagcctgatttgttccgtcaagggtgtttgtgtgcgccaggcgttgttgccgccttgtgacacgtatccttcgatcatgtcgccgaggaatgcgatgtggactcgttcgggtttgcctgcctgctgccagtagtgttttgcgactattagggagtgcaaatagtcgtcggcgaagtgtgatgtttctccgttggggatgcctttgccgatttggaagtcgcctgccccgatgacgaaggctgcagtgctgtagtcggtgcgggtgtcctgttcgggttttggtggctgccattcggctagcttgttgacgagttcgtctacagggtaggggttggttgcgggttggtggtcgatgattttttgtatggatcggcctgtttctccgttggggagtgtccattcggagatgcgtgtgcggcgtacggtgccgttggcgagattgtcgtcgatggtgtcgatggcgttgtcgtggttggctagttgtgtgagtagccggtctatattgtctatcactggttttcctcttcttgcggggtggtgttggcttgtttgcggcgatagtcttttataacggtggcggagatggggtatcctgcctgggtgagctgttttgctagccacgaggcggggatagacctgtcggcgagcacgtctgcagccttgttgccgtagcgttgaataagggtttcagttttggttgccatgatgtcctatcggttgtgtggcgggctgccatcctgtgcggcagtcgccgtcgtgtcctggtttgcgtgtgcaccatgatacggttccgtctgtgtagttgagggttttaccgcacatgacgttttggagatgctctggcagtgcgccgttactctggttgctggtttgtgtgtcgaagagtgttttctggttggtgaaatgctcggacacggtgccgttgtggacggggagtatccatgttttccattgttgttgcatccgggtgttccagtggaattgtttggccgcgttcatggcttgtttagcggttttgtagtagccgacgagaatgcgctgatgttcactgtcgggtgggtttgggcctcgccagtattgcgctgcgacggcgtagcggttgctggctgtgaaggtgttccagcagtattcgataatgtgctgtagtacactatcgggaatgtcttgtgcttggttttcgttaagccattcttcgacaatgatgccgtgtatggcgtgcttgtctttggtggtgggtttgaacgagatactcacgatagcaccggctggtcgtcttgcaggaactggttgaaggtgttgttcccggcgtgttgggcttgtgtgatttgctgatcggtccagtcagggtgttgctgtttcagatagtgccagcggcacgcattgtaggtttcgtcttggagccgggtgagatggttttcttcgatgatttgtttccacatggcccaggagacgtctagccggttgaggatttcgagggctgggatgttgaattggttgaggaagaggatttcgtgggtgtagtagtttttctcgtaggcgtcccatccgcttcggtgcctgttgggctggtttttggggtaggcttcccggcatactttgtgtaaacgtttggccatgtcgtcgggtagtttaatgtcggggttggcgcggatcatggatcgcatcccgtcataggtggtgccccaggtgtgcatgatgtaggtggggtcttctccatcagcccatttttctgcacagatggcgaggcggatgcgcctcctagctgtttggctggtgttgcgccggttggggatggggcacgtgtcgaggggatccatgatgtttttatgcctttctttgttggggttgcttgtgtggttttattgtagcacagtgtctagcgcttgtgtcaaccctgtttttccggcctgcaggtaggtgtctgtgacatcccccagggtgaggggcacatgggtggcttgggggagtgctgtctgaagggtttgggccatctgttcgcctgctttgtctgggtctgaccagatgtagatgtggtcgtagccttcgaagaatttggtccaaaagttttgccacgaggtggctccgggtagggcgacggccggccatccgcattgttcgagaatcatggagtcgaattcgccttcgcaaatgtgcatttcggctgccgggttggccatggcggccatgttgtagatggagcctgtgtccccggctggggttagatatttggggtggttgtgggttttgcaatcatgctggagtgagcagcggaaacgcatttttcgtatttcggctggcccttcccagacggggtacatgtaggggatggtgatgcactggttgtagtcttcgtggcctgggatggggtcattgtcgatgtatccaaggtggtggtagcgggctgtttcttcgctgatgcctcttgctgagagcaggtcgagtatgttttcgaggtgggtttcgtagagggccgaggctttctggattcggcggcgttccgcaatgttgtaggggcgtatgctgtcgtacattcgggttttctttctctagtcgttgttgtagcttgtggaggccgcctccgataccgcatgtgtggcagtaccagacgcccttgtcgaggttgatgctcatggagggctggtggtcgtcgtggaacgggcagaggatgtgttgctcgttccgtgacgggttgtagcgtatctggtgggcgtcgaggaggcggcaggtgtcagaggtgtgggaggagctcgttgagggttgataccacataggcttcgctccagggtttgttgcgctgtttcatgatgacgagtccgatggtggactggttttcgcggttgcggtgggtttcgtagttgcgtgcctcccggctggcttgtttcacaaattcggcgaggtggggctgtccggctttcgcttcgatcacataggttttgttgccggttgtgaggatgaggtcgccttcgtcctcgcggccgttgaggtggaggcgttcgatgttgtggccggtgtcgcgtagctggtggagtagtcgtgtttcccattctgcgcctgcccggcggttgcgtgcctgctgtgtcgccatagttttttagagtcctttgtgtgttgtggtcatgttccagggctgtttttcgaccaggggcccgaagaatgtgtattcggggtaggctctgagccgctcatattttgttccgtctgggctggatttgccggtgcgctgtttgagtacggcgatgcgggcctctgccggtatcgataggccgttgccgttgtcttcgccaccatacagggagactcccaatatgagttgtggtttttcggataggccgtttttgatttcccgcctagccggggggtgttcgatatcggagccggttttgtcggtggcgtgatgggtgacaataatggtggagccggtatctctccctaatgctgtgatccattgcatggcttcttgctgggcctggtagtcactctcgcagtcttgaatgtccatcaggttgtcgataacaataatgggtgggaaggtgttccacatttccatgtaggcttgcagctccatggtgatgtctgtccaggtgatgggtgactggaatgagaatgtgatgtgtccgccgtggtggatgctgtctcgatagtattctggcccgtagttgtcgatgttttgttgtatctgttgggtggtgtgttgggtgttgagggagatgattcgtgtggaggcctcccagggtgtcatgtcccctgatatgtagagggctggctggttgagcatcgcggtgatgaacattgctagccctgatttttggctgccggaccgccccgcgatcatgaccaaatcccctttgtggatgtgcatgtcctggttgcggtagaggggttctagctggggtatgcggggcagttcggctgcggtttgggaggccctctcgaaggatcgttgtagagagagcatcggagccttaatctatctgttggatggtgttttggtggtcagatggagtcgatgtcgatgtcggcatcggcgggggctgtggtgtcgtctagctggccgttgtcgcgcttgtctacgtattcggcaaccttgtcgtagatggcgtcgtcgaggggtttgagcacgaccgcgttgaacccgtttttggtgcgtacggtggcgagtttgaaggcttgttcttcgccgaggtaggcttcgaggtcgcggatcatggagtgtgggcggtcgttgttgccgcgtgctttttcgatgatggcgttggggatggtttctggggtgccgttgttgagatcctggagggtgtggaagatggtgacgtcggcgtagatgcgatcggcgacctgtccaccgtagccttcggtgttgtgctggacgtcgtggattttgaaggcgatggcggtggcgtcctggtttcgggaggggttgaagaaggtgctgttgctgttgttgcggtagttggcgagtcccattgttgtttcctttactgttttgttggtttgtgttggctggtattggtttatcgggtgaggctgtttcgtttgctgcggaacgcctcagacacttcactgttactggtgatgattttcttgtattgtttgagtaggtttgctagttgtgtcttgctggtggctttgttgatccggtcgatgatgatgtcgttttcctggttggcgattttgttgacgtagtctttggcggctttatcgtatcggtcttgaagcaggattgctgcgctagcgatgagggttgcgaggtcccagtctttggatacggtttcgtctttcaatcctcctagcaggtcaatgatggattgtttgatgtcttctgcggtgtctcctcggattactgtccatggggcggcgtagtctccgccgtatttgagtgtgatagttagcttttcgctgtctgtggtgtgctcgtcggtcacgtgttttccttttctttgttttcggcttctggtggctgtacgacggtttctatcgggtatctgtacgagtttttcccgttgacggcccagcaggcgtccctgacggggcatcctttgcaaagtgtggtgacgtgtgggatgaagatgccttggctgattcctttcattgcttgactgtacatggatgatacatgccggtaggtgttgttgtcaagatcaatgagttcggttgctgtgccctgctctaccgattgctcgtctcccttggtggtggcgggtgtccaaaacatgccttgcgtcacatcgatgccgtgttggttgagcatgtaccggtatgtgtgcagctgcatactgtctgcgggtaggcgtccggttttgaggtccacaatgaaggtttcacccgtattcgtgtcggtgaatacccggtcaatatatccgactatttttgtgccgtcggggagggtggtttctacagggtattcgatgcctggctggccgtccaggattgcggtgatgtattgtgggtggttgcgcctccatgttttccaccggtccacaaaggtgggtccgtatatcatccaccaattgtagtctttcttgttggggcccccgctttcgcacatgtttttgcacaccctgccggagggtttaatcttcatacactctgatgtggcgagggcgatttgggtggcgaaaatgtttgtgaaggatgagagtttgtctggcagttcagggtattcgtcgggattgtacaggtgtaggtcgtattgttcggtgatgtggtgtatggcgcttccggcgatggtggcgtaccaggtgtggtgttgggtgtggtagccgtgggataggcgccatttttcaccacattcggcccactgggtgagtgaactgtaggagatgtggcctggatggtggatggttttcgggtattgtgctaggggcattacttgtcgcctttgtgggtgttccatggattgcgggtgtctaccccggcattgtgttgctggtatgcgaggagtgcgaggcagtgccaggcagcatgtgccaggtgcggcaaatgtgattcatcatcgaggttgtttccttgctgccatgatagcaggtgcctgtagagggcgtcaacgctgtggctccacgggtatcctccggtccagttgttgtcgccgtatttggtggcaccgtagcctgctacttcgccgagggtgtggagggatgctgggtcgatgagggatagcctgcaaagtttgagttcttttcgggcaccagtatcagggtcggtgtacatgcgggttggctcatccatggtgtgtgtgctccttaagtatggggttactggttggggttgtgggcgagtgctacggcgagaataatgatggcgagggtttcggcaatgaggatgggtgttgtgatcatttagtgtctcggggattgttggtgagggtggaggcacccaggagggtggtgagggcgcatgcggcgatgatggcgagggctgccttgtggctggtgccggttgcgtacatccatgtgatgatgccgccttggatccaggccagtgtggtgaagaacgtttcgtagctgtgtagctcaatgttgttgttgggtgtgttcatgcttgctcctgaagaatggtgttgatggttttataaatgttgtacaggtcggtttcgatagataacagttggttgatttggtggtcgaggttgatgtctgggttgagggtgttgatgcgggatgcgatgtcggtggctgtgcgtagtgtgccgccggtgtggtgaataatgtgtgccgtgtcggcgagtccggtggtgacagtgtagtgggagaggagaggcatagcggggatgctccttggcgggttactgttgcgggtggatgttgaggtcggtgacgtgcgggtggtcttctgttccggtgacgaggcagtggacggtgactgggagtttggatgctcccggctgtttggcggtggcaccgtaggcgatagtaaaggtgtctttgtgggcgccgatgactttgtggaggaagaggtcgatgtccgggttgccgttccacttgacaccctgtgtggcagctttctgttcagccttgtcattgcaggtgtgtgccgcggtgatcatggtcagccccttgctggtttcttcaccccgtgtttgggcttgccggtgggctttggcctgctcggcgtgtagggagcggactgcggctgcctgccgtgctttcttgtcggctttgcgctgttggacggtttcaggtgtccattcggtgttggctgtggtggcttgtggggctggctgtgaggcgagtggcgggttgtcgccgggggctggcatgaaggatgctgcggcgatgatagcgactgtggcgccggcgatggtgtagcctgttttcttgttcatgttttgtgttcccctttccggggtgttgttcgttgctgacatgattaatactttcagcggctgggcccactgtcaaggctgcgctcagtttgtgtgagcgatccttgtgtggctaggggtggtggcttctttcgcccaatagtatgtgccaccgctagtccagtatccatggcggttgcgggccatccctttggtgagcatctcgtccacggtgagacacctgcgacgactggggccttccttaaccccatggtcgcctgtccggtgcatgtcgcctgaggtggtactcgtgaatgtttcgtggcagatggtgcagtgttctggtcggtatccggtgattgtggtgtcgcacttgtggcatgttcattgcatgattgctcctattttccattataagacttcctgtagtgccattttagcgccttgcgggtcttgggggtacaactatataggtcaggtatttctaggcgattctaggctcattgtgtgtggctggggttatcgggcgcacagggtgagcaggtggccaacattgatgcgggtcacattccagtagagttgcgtggcttccccaccggtgagcggcttccactcatcatggctgaacacggtgccatcagtggcgatgaacgtgttgtggcgtagcttgtgaagctcagtctctacacgctgccggtaggtttcggcgaggccctcaaaatccatgtggtcgcaggagaggttttcgaggcgtgtcaggtcgaaaggctcagggcagtcgtagctggcggggctgtagagctgggtgaagtgattggcgatcttctgcatgatgatgtccttttcgttgctgataacgttattgagggtttatcgggtggatgctttgaggatggcgtctacatcgatcatgtcgatgagatcgtggagttcctcagcctcgttctcggagaggtggcgccagccatggtcgccgtatacggcgccgtcgagggtgacagtccacaggggccggatgagtcgtatggcttcttgtactttagcgtggtacatgcggcgcaccatatccagatcgatgtcgtctgaatggtttccggtaaggctgtggaggctgagcgggtcgatttctgtctgcccgtagaggctggtgaatgatggtgtgatgagtgtgccatccatgagggtgtgctcctttcggtggtttaggggttgttgtggtttctagagtgtgtgggttgcagcccacagtcaagcctgcgctcattcggattgagcgtttcatggggtgtggcatggaatctacaccctcatactatgtgagatgtatcacatcctcctggcttagtgtgcaccctcaagaccactctgccgatctgacgtgaagggtgtagcccagaaataccgtttaaagcctctgcactgcgcctaggagcgcctcacagggtgggggctaggtattcatacccccaagcaattctgatcgattctagacgcctcccaggagcctgatacacgatcaactatctcggcatagaccatcaacctctatcatggttagctaagcctcaactatgtagacagtgtgggatgctcagggggaagaaggacacggtaaaagaaagagggggagcatcagccttcaagccttaaagtcttagcgcttagcaccgagcccttgagggggctcggcatcagtctcatcaggcacagccttagcaagtacacgccatcagggaaggctttcgagtacgaggagcctcagcgacgagtactcgaaagcctgagggaacaccctcagcactgatgggcctagcgtattcggaaaggacacaagagtgaagtgtgacagctgtcagggagtgaaaaccgttctggctaggggtttcagcctgaaccaccctcaaaggttacaagattctaagaaaatttaaggaaaagtttaggtttaatttttggacctttactaccaaaaacacccgtttacacccctcaaacccgcctatagagccaaaaccaccagtttgactcatcccaggtggggtatgataggctggacaggtagccagctggacgcaaggccgaaatccgctgacgcggctttcacccttacatccatcagtctaccaaagacttaaaagcttcaaggctcagcgctaagcccttaagaccttaagactgatgccgagcccttgagggggctcggtgctcagcgttaaggtcttaaacactttaagtaactttaaaaccttaaaggctaagcctttaaggatctaagttactattaaagctttaaagtcttaaagtaaatataaaaccttaacagttaaacgttaaaagctttaaaccttaacacttaagttaagtataaaaccttaaaggcttagcacttaaggatataaacttaacatcagtgtttaagacttaaagagttaaagtaactataagactttaaagaccttaagtacttaaagttaaccatcagtattaaactttaatattataacctataagtcttaaagcttataagtataataatataatataagtcttaaagcttataagttataaaagtttttagaagagttaaggggttaacttctttacttctcttctctctttggttctttctctcttctcttcttttcttcatcaggggagaagaggaacctttaccgtcaacgctgatggacttttcgccgtgtgtctcgtgtgcttctggtcgcaagctcccatcgcacactccccacacttactctacccgtgtccctttcaggcttagcgtgttcggctgaaggcgtacggcgtgtcacgcttaaacccttaacaccaggtaagacttaaagtacatattataagtagaagactttaaaaccttaagggtgttcccgcttagcctgtgtcctttaacgctaggcgctaagccgtgaaacgcgaacacccatccaccccccatttttcttccgtgttcttctctttttgacacagctggggggcgatgtgatatttctcacatgccagggggtgtgagggaaaaacaaccaccccggcacaaacagaacaccccccaaacgaacaaaacagggcctaggatcgaacagcagggccccggtagagtattcctacccccagacgattccaggccgttacaggggcaatgagaggctcacaggggccataggtgattgggggacgtgatgacacacaccaaccgcaccgcatcatcagcccaccggcgctggcgggcaagactcatcacccaagcacgcaagcagggccaaaccgaatgcccactctgcggagcccagatagcctgggacacacacgatctgccaaccagccccgaagccgaccacatcacacccgtcagccgaggaggactcaacaccctcgacaacgggcaaatcatctgcagaacatgcaacagaagcaaaggcaatcgcagcgaaccaaacattagtctccaacaacaaaccacaaaa

SEQ ID NO: 8 - DNA, 29097 bp, Propionibacterium acnes bacteriophage
ctgatgccgagcccttgaggggctcggtgctaactgctaagaccatcagtgctaagcgctaagaccttaaggcttgaaggctgatgctcccctctttcttttaccgtgtccttcttcccccttagtatcccacactgtccacatagttgaggcttagctaaccaggataggggttgatggtctatgccgagatggttgatcgcgtatcaggctgtgggggacgtctagaatcgatcagaattgcttgggggtataaatacctagcccccaccctgtaaggcgctcctaggcgccgtgtgaaggctttaaatggtatttctgggctacacccttcacgtcagattggcagagtggtcttgagggtgcatactaagccaggagtatgtgatacatctcacacacctagatgatagatcttatgtctcatctcggcgccttgactcgctagaccatctgccacacccgccataacccagacacacccctaaggcgccctagaagggccctagaatcgatctgcagggtcaaccctatataatcctaccccggacatatttcaggcgctgagagaggcaataaaggcttcagtgacatctgtcacacccgacactccagcatgaaacgctcaatccgaatgagcgccaccttgactatggatcacaacctacacactctagaaaccacaacaacccccacaaccgccgaaaggagcacaccctcatggatggcacactcatcacaccatcattcaccagcctctatgggcagacagaaatcaacccactccaccccgcacacctggcaggatgtgacataggcaacacccacacgtctatcatctgccgcctgtaccgtgccaaagtcgaagaagccatacgactcatccgacccatgtggactgtcaccctcgacggtgccatatacggaccccatgactggcagccactcaccgcggatgaagctgaggacctccacgacatgatcgacacgatcgacgtcgacgccatcatcgccgaagccacacgataaaactatcaacccaccacacgagaaaaggaatcatgatgcagaagatcgccaaccacttcacccagctctacaccccagccagctacgactgccccacacccttcgacctgacacgcctcgaaaacctcccctgcgaccacatggattttgagggcctcgccgaagcctaccggcagagcgtggaagccgaactccacaagctacgccccaacacattcatcgcctccgatggcaccgtgttcagccatgacgagtggaagccgctcactggcggtgaagccacacaactctactggaatgtgagccgcatcaacgtaggccacctcctcaccctgtacagccgatagccccccaccccacaagaatcactcgtacacaatgagcctagaatcgcctagaaaatacctgacctatataatcatacccccaggggctgaaagtcgctctaacccaccgagtcacagcttaaaacacgaaagaaggaccaatcatgcaatggacatgccacaagtgcgatagcacaatcaccggataccgaccagaacactgcacagtctgtcacgagacattcactagtactcgctctggcgacatgcaccgcacaggcgatcatggagtcaaggaaggccccagtcgtcgcaggtttctcaccgtggacgagatgaaggctaagggtatgaagcgtaatcgtctcggctactggactacaggacgtgacctgtcatacctcaaggacaaaacacctagccacacaggaaacgctcacaatcgttgagcgcagccttgacacgaggtccagtcactggaagtattgatcatgtcagcaacgaacaacaccccggaaaggggacaacagtcatgaacaagaaaaaaggctacaccatcgccggcgccacagccgccatcattgccgcagcctcattcatgccagccccagacgacaatccgccactcgcctcccagccagccccacaggccaccacagccaacaccgaatggacccccaagactacccaacagcgcaaagccgagaaagcggcacggcaggcagccgcagaacagtcactgcgagccgagcaggccaaagcccacaagcaggcccaagcaaggggtgaagaaacctcacaaggtctcaccatgatcacggcagcacacgcctgcgaccgcaaagccgaacagaaagccgcagcgcaaggcgtcaaatggaacggcaacccagacatcgacctccaactccacaaaattattggtaaagacaccttcagcatcgtctacggcgccaccgtccgccagccgggagcatccaaactacccgtcaccgtccactgcctcgtcaccggaacagaagaccacccgcacgtcaccgacctcaacatcaacccgcaacagtaacccgccaaggagcatccccgctatgcctctcctctcccactacgctgtcaccaccggactcgccgacacggcacacatcattcaccacaccggcggcacactacgcacagccaccgacatcgcctcccgcatcaacaccctcaacccagacattgatctcgaccaccaaatcaaccaactgttatctatcgaaacagacctgtacaacatttataaaaccatcaacaccattcttcaggagcaagcatgaacacacccaacaacattgagctacacagctacgaaacgttcttcaccagcctcgcctggatccaaggcgccatcatcacatggatgtacgcaaccggcaccccacacaaggcagccctcgccatcatcgccgcatgcgccctcaccaccctcctgggtgcctccacactcacctaccagcccaaaaacaacaaatgatcacaacacccatacttattgctgaaaccctcgccatcattattctcgccgtagcactcgcccacaaccccaaccagtaacccacccctaaggagcacacccccatggataagccaacccgcatgtacaccgaccccaacagcggtgccaaaaaagaattgaaactttgcaggctatccctcatcgaccccgcagccttgcacgatctaggctccgtggcaggatacggtgccaccaaatacggcgacaacaactggaccggcggctatccgtggagccacagtgtcgacgccctctaccggcacctactatcatggcagcaaggcaacaacctcgatgatgaatccgggctaccccatctagcccatgcagcctggcactgcctagcactcctcgcataccagcaacaccacgccggccaagacacccgcaacccatggaacacccacaaaggcgacaagtaatgcctctagcacaaaaaccatccaccatcgaccatccaggccacatctcctacagttcactcacccagtgggccgaatgcggagaaaaatggcgcctatcccacggctaccacgcccaacaccacacctggtacgccaccatcgccggaagcgccatacaccacatcaccgaacaatacgacctacacctgtacaatcccgccgaataccctgcactgccagacaaactctcatccttcacaaacattttcgacacccaagtcgccctcgccgaatcagaaggcaccgaaatcaaaccctccggcagaatatgcaaaaacatgtgcgagtcgggcgggccacacaaaaaagactacaattggtggatgatatacggccccacctttgtggaccggtggaaaacatggaggcgcaaccacccagaatacatcaccgctgttattgacggccagccaggcatcgaatacccggtagaaaccaccctccaggatggcaccactattgttggctacatcgaccgtatcttcaccgacaccgacactggcgaaaccttcattttggacctcaaaacaggacgcctacccgccgacagcatgcagctgcacacctaccggtacatgctcaaccaacacggcatccatgtcacgaaaggcatgttttggacgccagccaccagccgcaacgacgacaagtccccgacacaaggcacatccaccgaactctatgaccttgacaacaacacctaccggcatgtatcatccatgtacagtcaagcaatgaaaggaatcagtcaaggcatcttcgtaccccatgtcacagcactctgtaaaggctgccccgtcaaggacgcctgctgggctgtcaacgggaaagacgcctacaggtaccctatagaaacaaccatcacagccccaacaaaagaaggcaaggaacaccagtgaccgacaacacagacgacgaccgattcaccgtcacactcaaatacggaggcgactacgccgccccatggaccgtcatccgcggagacaccgccgaccaggtaaagaagactatcatcgacctgctaggcggactcaaaaacagctccgcggcaaggaactgggacctggcaacactgatcgccacagcatccataatcctccaagatcgctacaatcaggccgccaaagactacgtagacaacatcgcctcagaaggaaacaacaccatcatcgacaaaatcaacaatgcaacaagcaaagcacagctagccgacctcctcaaacagtacaagaagaccatcactagtaacagtgacgtgtccgaggcgttccgcactaaacgaaacagcctcacccgataaaaaccaacaaacaaaccaacacaaacagtcaaggaaacaacaatgggactcgcaaactaccgaaacaacagcaacagcaccttcttcaacccctcccgaaaccaggacgccaccgccatcgccttcaaagtccgcgacgtagaacacaacaccgaaggctacggtggacaggtcgcagaccgcatctacgctgatgtcacaatcttccacaccctagacgatctcaacaacggcaccccagaaaccatccccaacgctattattgagaaagcacgcggcaacaacgaccgcccacactccatgatccgcgacctcgaagcctaccttggcgaggagcaggccttcaaactcgccaccgtacgcaccaaaaacggcttcaacgcggtcgtgctcaaaccccttgatgacgccatctacgataaggttgccgaatacgtagacaaacgcgataacggccagctagacgacaccacagcccccgccgatgctgacatcgacatcgactccatctgaccaccaacacaacatccaaccgatagacagatagattaaggctccgatgctctctctccaacgatccttcgagagagcctcccaaacagccgccgagctgccccgcataccacaactagaacccctctaccgcaacctggacatgcacatccacaaaggggacctcgtcatgatcgcggggcggtccggcagccaaaaatcagggctagccatgttcatcacagcaatgctcaaccagcccgccctctacatatcaggggacatgacaccctgggaggcctccacacgaatcatctcactcaacacccaacacaccaccgcccaaatacaacaaaacatcgacgactacgggccagaatactatcgagacagcatccaccacggccaacacatcacattctcattccagtcacccatcacctggaccgacatcaccatggagctacaagcctacatggaaatgtggaacaccttcccgccactcattgttatcgacaacctgatggacattcaagactgcgagagtgactaccaggcccagcaagaagccatgcaatggatcacagcattaggtagagatactggctccaccattattgtcacccaccacgcaaccgacaaaaccggaaccgacatcgaacaccccccagctaggcgggaaatcaaaaacggcctctccgaaaaaccacaactcatcctcggagtctcattgtatggtggcgaagacaacggcaacgggctcaccatccccgccgaggcacgcatcgccgtactcaaacagcgcacaggcaaatccagcccagacggaacccgatacgaaagactcagagcctaccccgaatacacattcttcgggccactcgccgaaaaacagccatggaacatgaccgaacaccacaaaggactatcatgtcaacacaacagtcacgcaaccgccgggccggcgcagaatgggaaacacgactcctccaccagctacgcgacaccggctatgatatagagcgcctccacctcaacggccgcgaagacgaaggcgacctcatcctcacaaccggccacaaaacctacattatcgaggcgaaagccggacagccacacctagcccaattcgtgaaacaagccagccgggaggcacgcaactacgaaacacaccgaaacaaacaaaacaattccaccatcggactcgtagtgatgaaacagcgcaacaaaccctggagcgaagcctatgtggtatcaaccctcaacgagctcctcccacacctctgacacctgccgcctcctcgacacctaccagatacgctacaatccttccaggaacgagcaacacatcctctgcccgttccacgacgaccaccagccctccatgagcatcaacctcgacaagggcgtctggtactgccacacatgcggtatcggaggcggactcgccaaactgaaacaacaattagagaaagaaaacccgaatgtacgactcactacaaccctacaacattgcggaacgccgccgaatccagaaagcctcggccctctacgaaacccacctcgaaaacatactcgacctgctctcagcaagaggcatcagcgaagaaacagcccgctaccaccaccttggatacatcgacaatgaccccatcccaggccacgaagactacaaccagtgcatcaccatcccctacatgtaccccgtctggggcggcccagccgaaatacgaaaaatgcgtttccgctgctcactccagcatgattgcaaaacccacaaccaccccaaatatctaaccccggcaggagacacaggctccatctacaacatggccgccatggccaacccggcagccgaaatgcacatttgcgaaggcgaattcgactccatgatcctcgaacaatgcggatggtcggccgtagccctacccggggccacctcgtggcaaactttctggaccaaattttttgaaggctacgaccgcatctacatctggtccgaccccgacaaagcaggagaccagatggcccaaaccatccaggcggcactcccccaagccatacacgtacccctcactgtcggggatgtcacagacacctatctgcaggccggaaaaacagggttgacacaagcactagacacagtgctacaataaaaccacacaagcaaccccaacaaagaaaggcataaaaagcatcatggaccccctcgacacatgccccatccccggccgccgcgacaccagcaaagccgcccggaggcgtatccgcctcgccatctgtgcagaaaaatgggccgacggcgtggacccactccacatcatgcacacctggggcaccacctatgatgggatgcgatccatgatccgcgccaacaccgacattaaactacccgacgacatggccaaacggttacacaaaatctgccgggaagcctaccccaaaaaccagcccaacaggcaccgaagcggatgggaccaatacgaaaaagactactacacggaggaaatactcttcctcaactccttcaacgtgccagccatcgacatgctcaaacgactcgacgtctcgtggacaatgtggaaacaaatcatcaccgaaaacaatctcacccggctccagcaagaaaccgacaacgcctgccaatgggcaaacctgcgaaaacagcaccccgacaaaacggatcaggaaatcacccagatgatgtacagtaaccaagtaacgttcagcaaggtgatgaaaaccatacccgcataaacacccacgacacccgcacagtatgtgcacactctttcacacataggagacatgatggtcaccaaaacccaacacgtgaccgacacaaacagggacaacaacgaccagctgccggagcatctacaagacgtcatgtgcggtaaaacactcaaccacacagacggaaccgtctcatggtgcacacgcaaaccaggacacgacggcgactgccgcacaggatggcagcccaccacacaacccctaggacatcatggcaaccaaaactgaaaccctcatccaacgctacggtgataaggctgccgacgtactcgccgacaggtccatacccgccacacagctagcccaaatgctcactgaagccggataccccatctccgccaccgttatcaaagactaccgccgcaaacaagccaacaccaccccgcaagaggaggaaaaccagtgatagacaacatagaccggctcctcacacaactagccaaccacgacaacgccatcgacaccatcgacgacaatctagccaacggcaccgtgcgccgcacacgcatctccgaatggaccttaccgaacggagaaaccggccgatccatacaaaaaataatcgaccaccaacccgcaaccgacccctaccccgtagacgaactcgtcaacaaactagccgaatggcagccaccaaaacccgaacaagacacccgcaccgactacagcactgcggccttcgtcatcggggcaggagacttccaaatcggcaaaggcatccccggcggagaaacatcacacttcgccgacaactatttacactccctcatagtcgcaaaacactactggcagcaagcaggcaaacccgaacgagtccacatagccttcctcggcgacatgatcgaaggatacgtgtcacaaggaggcaacaacgcctggcgcacccaaacacccctgacggaacaaatcaggctcacccgcatggccatgatgcaactcgtccacatgttcgaccactgcgccaacgtcaccatcacatccatccccggcaaccacggagaagccgtacgcttcggaaaaggagtcaccacctacgacgactccttcgatgtggactgctgccgcgccatcgcagaagcctaccagctcaacaaccaataccccaacctacacttccacttccccagccgagacgaaatgaccaccaccgttgatgtggcaggcacacaaatcctgcacgcccacggacaccaatggcgcaccggcaaacactacgaatggtggcgcggccaagaattccacaacggaaccacatcccacatcctgatggccgggcaccggcaccacctagaaatctccgagcaaggcacacgcaccttcatccaatgcccatccatggaaggagaatccacatggtatcggcaccgcacaggcaccaccggaaaccccggactcgtgtgctacactatcaacaacaaaacaccaaacaactaccagatagccaggtaatagtgccatgagcagacgaccaacaaaagcagacctagccaccaccgcatcgtgggtgtgggccacagaccatcatctacgcacactcaaccgggcatgcaccaaaacagccgcacactaccccgcaatcagcgcagacgacctctaccaagactccctactatatattgcagtgcgggaacaataccacaacctagacaacaaacactacaccaaaatgtgctacagggtagccaaacggctagccaacaaaaccatacaacacctagaccagccgaaacctttacccgatatcattcatctagccgacaaccaaaccagcatttaaaaggagaacacacaccatggtcacaaccatcctcgacgacggaacccaaaccaccaggatacaaacagtaggcgccaccaccaccgccatcatcaccaacacagaaacaccagaaaccatcaccgccaaatacaccatcagtaaagacggcacagccacctacagcatcagcggaaacacctatttgggagaccaccaacacattattaaactcatgtacgactactgccactgcgtcggacgattcgacaccaccaacaccagcaacccagacaacctcgacaacctattcaggggatgaccagtgaaccgaacctacaccaccgccgacatcatccaagccgcccaatggatctggaacggcggaccatggaaaccatcagtcgagccaggcatgccaccaccaccaaccgcgccacaacaccacggcaacaacatcgttaccatgatcgatttgcagctagccatcgacgactacaccctcacctgccagccatccaaacagcgaaaacatttggcacgcctggccgcattccgggaagtctacggatacgaccaaacatatgccacagccgcccaacgattgggtgtcacccggcaaaccgtgaaacagtgggcagaccaaacactcatcaccctaacaggctacgcaaacagtagatactatccagacgatagcgacgacagcacagggacgaaataaaaccatgaacaacacaaccaatatcacctacactgccctcaaaacagcggtacaccgaatcatccaacaacagcccaccaacatgaaccagctgcaaaacattgttgacagtgtcgaaaaccagtaccgtgtacacatctcactcgacaacgtgaaccttaccgtcaaagaagtcagcctcgacgatctcgctatcgaccaggacacgctagacgagtgcagcgaaatcttgtgggactgcgacagtgcaggatacccaaacaacagcaacacccgtggcattccagacgacacacgggcaagccaggaagccatagattggctcgccggaatcgcataccaaaccaaactactgcaagcggcggccgacgagatcatgcagtctatcatctgccaccgcgacaaccacaaaaatgttatcggccagaacgttctagaccaggccaacgatactatctccgcctgcctccacctggaccagctgatcgaagacacactagacgacaacctgtaaaactcctgtagacacaaaaatagtgccccagcggcaaccaccacacaatcgtggcagcaccgctggggcacacatctatattcacttatgcaacagtagactctaccgtcccaacctccgactcggctgcacgccgaggctcatagcctacaccaagatccgcatcctctgcaggctcgatcatgccaggatccgacacatccaccaagtgcggctcaaccaagcccccatcatccggtggaaccaaacccgcatccacaggcgtggttttaggtttgccggccacaaacgctgggctaccaaacgatgtagccaccgacaggactgcagccaccgttgctgttatcagggccgactcccacggcaaaccgcgaaacgactccgccgtataggtgacacccgccgtcacccccaacaccgcaacaaacgtttgaacaaaagtcttagccgcccgctccagtaaacctaaccaaaactgtttacccatcacacatcaccatcactttttcaaatcgttgacagcagactcgagcctgtcaatacggctacgacactccagcacgtaataccagacactccacaaagcgtcttttgtgcgccacagcttccccgtcaccggattcttcacccacgacagggcatcaacacgtttactcaaatcaccattctgaacctgaaccacaccaacatcatggtgcagcttattcaccgaaccactaagctgagcagacaattgtttaatctgatcatgcaaggctttcacatcagccaccgttaactcctcactacttgaaccgccgccgtggccattcaccacagccataaacttgtcccacggaaaccacggccccggatcgtcatgatccgactgatgccacgcatccgtcacatcagtgtgcccgcagatgccccgcctacccgctttcagatcggatacgctaagcttccttttcggaacaccatgcttgtcacacaactgccgacacaggatggcggcacgctccacagcgggccacaccctcgggtcaagccactgctccctcgtgtaagcatgccctggcacacggaacgaggcgtgcgaacccccatccgcgcaaatctctatacccaaactatgcggattcggcggggcatgccacccaatcgtagactccgacaagcactgcaccgtctccccaatatcacacacataatgggcagaaccacccgacgatggggaagcaaaatagtttgccgtggacaccgcccgccccttacgcgaggcagacggaaaccccacatccgggcatgtcgcatgaatcaccaccctattcaccggactattcgagccggccgagtgatgcgccgctggaatgtatctcaccacacaccaccaccaaacacaaccaacatcagtaacacccttcccttttcttttttacttgcgggatgacacggtaaccacaggtgatggtttcacactctcgcaggccaccgaacccgctatggtagaggccgtaccgtcactatatttcacaaccaggcggcccccggaacagtacaccgatatcaccgagcgcccatccttaccatctttaccatcggatccgttcgcaccggcagaaccctgcggcccctgaggccccacagggccacgctcaccctgtgcaccggctacaccagggggaccggcagggccacggccaccatcagccccatcagcgccatccctacctggcacgccatcccggccatcagccccgttcacaccggcaacaccatcatggccatccgaaccgttagcgccaggcaacccgtcaggacccttcacaccattcaaacccggggaaccctgcggaccaacagggccaaccagcccagccgaaccattaacaccatcccggccatcaacaccagcgggcccttgcgggccgcgctcaccggcaggacccggcacaccctgcacgctacgctcaacacgctgagcatccacacataagccagactggtgaagacgcaccgactcctgcccacccgaagcacacacccgcttcacacggctggccaaccctttagcggctgtaccattagactgggccctcgcctgctccgaatccctttgcgaagccacagacccgtaccgtaaagcacccgcagcaaccaccgccaacagcacaagcgacaggaacaacagtatcagggaagccttctcaaacgagcggcgctgccttttttcttcctccaactccctcacaattcaccccccaccaccatcaacagtatccttcaaaaactcgggcaaatcaggcatcttcaccggctcaacattctccggcagattcgcgttatagcggtgaacaatatggcgaatattccacgtgtactcttccatcgcatcaacctgcgcagacaactgcctaagcctcttcttcgacctgtacgtaacagcctgaatcgaaccaaggacagtagcgatagcggtacaaagagaggctacgagtgtgggtgtaaaccatgacactatagccccctacaactaaaaccaccacaacacgtcacataccagcaagccgcgcattacacgccgacagcaatccagttagccaccgcaggcaccccattcggcttagacccgtcattcgtgataaacgccaactgaaaatccttggcagtaacattgtaggctttcacatcaatctgctgcgtgcccccagccgccgtagccatagacgccaccaccacaggcggactactgaactggcgctcaaacgggatcgtgtaagcatacacagcagacccgccaaacttgatctgcttagtgcccgtctcaatcctgggggacaacagcatccactcgttagcatggttagcccacacagcccccgaaggcaccatcacccggtcaccctccacaggggtaggatcacacgcagcagactcgccaaacgccaccctcgccgctatagcacgcctatccaactgctgctgcaacccgttagacgacaacaccaaagtagccagtagctgctgatggtacacgccaggctcagcccttaacacgtcacgggcacgctccgcacgccccccaggaacaatctccaacttggccgtattctgctcccaatcccgagacaggacaacatagtcgtatcgggtctcgccagggccaggcagctgccctgtcaccgtctcaacactattcgacgtgcacatcaccccgtgagcccaagcctgccccggcaaaacactacacaacaccgtggcaccctgaacagtagtgcccacacgaaaatcgtccgggcccttcacggacggcatattacccatcagaccagacatttgagcccaatcatactcggtcaacacaccatcaaaacccttgcacacaatacccacaacaaacccccaattcttttctaaaatttttgcaaatcccgcacacccgcagccaaatcagccacacggcgagccaacagggccgacggattatcctcataatcccccgcaataggagtcaccttcgtccacccgtcaccaggcgatacacactccacatcaatctgccgaacaatctccgcaataggccccgagcccacatccacatagatcaaatcacccggcatcagattgcctggcccaaaccgcaacacatccgactcagccaactcgatcttaaaccccgacgtggcccccgactcggacaacacccgctccgcctcatcaataagatgcacatgctcagaatccgtgttacgggcatccttaaacacctcgacacgatcaaaccactcatcctcggccaacgcgtcaaaatcctcacaaaacagccgatccttgccctcgccgcggccacccacaaccaccgccgtagccttcggggcgtcacgcacatactcccacgacacaatagacccagactcggcagtcaacacatggtcacgcgtcacagcaggcacacaatcaaacagtaaaccccgctgatcctgcttcacattctcaaactggttcaccgtgacagtcatccgagcccacgacaacaccggcaacaacttatcggcaaacacgtgaaaccgcgcctgaaaatccttaatatagcggccacgactcttatcatccaccataaatatatcaggcggaaaacgccaagtattatcccgcaacgccttcttagcgaccgactccgccgcacccgaatagtgggcataatccctattggcacgccactccatcccaatgatgctggaacgataaggcacaggccacaacagcatacgccacaacaggcggatatcatcctcacacgtgatagtcacccgcgaagaacgccaaggaccaacaccatgcacccgacgcacaggcccagaaaaaatctggccaccaccataatcaacaaccagccgtgcacccggcctagtcaatccttcaagcctggaatgatccccagacaccaccaactccaaagtggacaaaccattccacttcaacgacaacttcaacgactcaaaaaaattgataggcgccacacgacgataatccggcgtaaacaatgttatctgcggaacaagaccagccatcaaccattcaccaagccctcaaaaacctgtactgcaccgacacaacaatggcacccaaaccaaccatctcaatattcacactcttcgaaccgccaggcggaataggcgcaaactcccactctgtcaaacgatccatcacatcctcaaacccgttcaacaacgccgactgctggcgaggatccgtgtcaatagtgatccaatcatactcctcgacaggataatccgaagacacacgcaaaccatcaatctgcacagaccacgactccaaaggaccctcaacacgaatcacaggccacgcaggcacatcacccttattagacagattatcccaacccgaaccaacaccaggcgtcaacaccacaggaaacgccgtgccatccttgccgacagggccgccacccaaccaatcctgcaacttcgcgttactaaaacgaaacttttgctcatccccataccaaaacgggtcataggccgtcaaatgaatcacataacgcgcataacccctgttcaccggatccaccgtaaacgtgtcatcaaccgaatcaaaccggcattttagcacacgctcacgaccggcaggagtcttcacagacaactccccctcctccccgggaggaaaagcagaccacaacgcgtcataggctttcaaaaaaccgtcacgaaacccgccatcaggatccggatccacacccgacaccaacaccggcagcgtcacctcgcgaggcttcacattaaacccgcgccactccgagccgtgcaccccaacatgcgtttgagaaaaatgctccacctcaggaacacccaaaccgcgcaacgaatcattcaacaacatcaccggagacgaccccgtataatccgtcaaatgaagcacacgctccccaccaaacagcggatccatagaccaggtcacagtcaaaccagaacgatcagacgggtcaggaataaacatgcatacccctttactcacatataagccaacgcgttcaaagcgtcacgctgctgccgctcaatccgcttcgcaaactcggcaggatcaccatacgtcgggccattcacattcaccacaacactcttatcattctcacgccgataccggtcatacggggtaaacgagcccacagacgatcgcacaccaaaccgggcatcaacagcatccggaagctgcgaagcaacacccgacatcgcatccaacgccaaaccagcattaccagtaataccctcagccaaaccggcaacaacctgccggccaacctcgtcacgaaacaccctagacggggaatgaatacccagagcagacttcgcagcattagcaatctgggaacccatgttacgcaccgtatccaacaggccactcatagcattcttaataccgttacccaaaccggcaacaacattatggccagcagacaccaacagggaccccatgttacccagggcgcccctaatattgctgggcagattccggaaaaaacctatcacactatgcacaccactagacacagccgagcccatagcgtgcatagcagaagaagccgcacccctcgcagcgttaaacccggacgaggcagcaccacgaacccgagaagccatcgacccgaaaaatccgccaacagcggacgccaccgaagacacaacactccggatagcattcatcgcagaagaaacagcgccacgagccgcgttaaaaccagacctcacatgggaggcaaccgaagaacccagccgggcaaaaaaccccacaaccgcgttcacgccgccagaaatcaccgacttgaaaccattaataaacgcagacgtaaacgccctaatatgattccagccagcctgaaccaccgaacccatacgcgccaaaccagacacaaaatgggcaacaacccacgagatgacacgggcaacagcggcaataacacgggccacagccgacacgacagcaccaacaatacgggcaacaaacccgaccacggccgccaccatcggagccacaacagcaagaatacgggccaccacctgtatcacaaccgcaacaacctgaaccaccacacgcataacagacatgatgactggtatcaacgaccggatcaggccaataatcggtggcagcacagacatgacagcacccaaaatctgttgaatcaccggcatcaacaccggcaccagttgcatgatcacgccaacaacctgacgtatcacagccacaacagcctgcaacaccggcataagcgcaggcagcaacattgcagccacctgcgtcaccgcaccaataatctgcgtgatcacaggaaccagctgggcaaccagcatactaaccaaaggcataagctgcgcagctagcccggcaaccaaaccgataatctggccaaacactggcgccaaccgtgccaccaaaccagcaaccaaacccaacagcggctgcacagcggccatgatctggcccaacgcctggccaaccacagccacaagctgcatcaccgcggcacggaactgggcgttcgtggcaaacatggcagcaaacaagccgatcacaatcccgacagggccacccaaggcgcgaaacacgccgccaagcccgccagccgcacccctcaaagcaccaaacgacggcaacaaattcttcaacgacaccgccaacggggcaaaccccgcaacaagcttccccacaccggcagcaacaataccaaacactgcggtgccgccagcaaacatggcagccaaattcactttaggaacaggcaaatgcattctcgcaaaaatgcccttcaactgctccaccttggcgcgcatctgtgcattcattcgagtgatcatgcccggcatacggttaatccacgccaaaatagacggcatcatccgctgaatcccctgatccaccgacgcaaacaaaggcttcacagactccgtgatagacttaataaccggattcaacgcaacaaaaatctgcctcaggccgttaagaaacggcgccatagccgtagcacccaaataacccagggcgctcttaacattcttcatagcgccctcaaacgtcttaccagacgcctgcgcagcaccacccatgccaagcttcatcgcagccgcaaacgtgttaaaatcaatctgccccttcgacaccatctgcgacacctcagcagacgttttacccgtctgcctggcaagcaaagacagcacaggaacacccgccatcgtaagctgcaacatgtcatcgccctgcaacttaccgcgagccatcacagacgtaaaaatagcgcccgtatcctgaaacgacttaccagaaatataagacacatcggcgacagtcttcaacacatccgtcatctgcccgccagacttcacacccgaagcagacaacgccgcagccgtagacgccgcatcacccaacgcatacgacgtaccagtcacagcctcaatagccgaattcataatcgaagacgtgtcagacgacgtgtgacccaaaccagtcagtttagcctgagcctcatcaatagccatcgccctagctataccgccaccaatagtcacatcataaatcgacttgaggcccttcttagcaacattgatggcgcccaccattgcggcaccaccaagcgccaacttcatacccttagcaaacaaactacccgaacgctgaccctccgcaggcatcaccccagaaagctgtttaccaacatcacttttaaggccaggcatcttcgtatacaacgacacatatgcggaagcaatctcaccagacatacactattcaccccataatattaatctcgcgagacatcccgccaccggcgcgaacacgcgccaaaatatcgtccacctgcccagacgtaaaccgggccctacgctcatccgtaggcctcgccacaggctccggctgcccctcactattagcagacctgtaatgatccaacatgtccaacacagcccactcgcaccactcaaacgggcgctgccaaccattcaggtgggccgccaactggctagacgtatcggtacacaacacgccagccagccggacagcctcaccccaacacatctgcgggccaccaacactataaacagaaacaccaaacttggtgcggaaatcgtattcgatggccccacgataatcatcaatcaggccgtggagccaaactattcccccagcgaggcacccttaccttcaggcttatattccatccactcacggaaaatctcggccacacgaaccataggaagcccctccagggcctccacagcatcctctggggcggcagcctccaacatagaaaacatcacctcaacctgggcgaaatcagcagactccccagactgggcaatcctggcggcacgacggaaaacgcgggcaggaacagcctgcgctgtttcctccgcatccgccaacacccagctacggtcaccaatcttcaacgtgtaacctgtgtcactcatctatcaacaatccctaaaatagtgtatcagttaccggccggaggattcggatccggctcaggcttaggcggcttaggaggctccggcttcggagaaggaggaaccgggggagtatcagcttttaaagccgtcatccacccccgaccagacaccgcatcacccttatggttaatctgggcaggatacgccttcaacgtcacaccatacccatacacctcgccattcttgcccttaatctcgtcacgatcgacaagctcaacctcagggaaatagtagcgaataacctgatcgccatcaataatatccatcaacagggcatgaacacccgtcgtggcaccaggagaaatatcgaacgaacccgaatcggctccggcagtaaccttcgactgccaaaacagttcgataacctccttcttagactcgatcagctggaaagaaatctcgatagaagactccgtagccacagtgcgaacaacatccgcattctgccaagccttcaaatcatccgttttacgctcaggcttaatcttaaacccgtcatccgacagataccctaaagcggtaagaccgtcaggaaccgtcttcacaccatcaatagtgtcaccggcatgagctttaccaatatagacgtcacccgtaacagcagagcgaacattagacgctttacgtgttgcagccatcataacccccaaaaatatcaaacaattacattaaaacaaaaacaataagcttattcagactccgcaggcctacatataagctcaaaaagcgaatacacatcaaaacgtgcaccatcaaccagcaaatcagggccagtagaccgtttacagtacaccacagggtcaccgtccacaccatcagccagcacagcctcaacacgacgcgccaacgacatagcacgatccggcatatcagaaaacacattcacccgcaaaaaaacacgctcacgaacatgcaactgcgggccaccatccaacgccaaccaaataaggtcaccctcaaactggtcaggcaccgtcccagtacacggtatatcggacagccagccatcatccttgagcacgcgtttagcccacttcctggggtcaccgtagacgatcacgacgcagccccaatcgacctagccagcgtgccatgcttcgcctcaatccttttaccacccttataggtggtgccaatacgggccacagcctcaacacggtgaacctgcacctccgacgacaaaccattacggtattgggccctatcaaacgcgttaccgcccacattcgccgaggctgcacgcctcacacgctcgccacgctcagccaacatcgactgcaccccagaagacttcaacacctcacgaatacccggcaagttcagcttcacattcacatcctgagccacaatctatcagcccttcttacgcttcacattgatctgcgtgcccgcatcccaaccagacattgggtgatgccacacgataggagacccgtcagcctcccacacaacaccccggatacgccaccggcaacgataaccggcacccacaacaggctgcttaaaaagcatcgaccaatgctcatagtcagagtcacgccccgcggcctcatcctcctgcgaaacggaagcatagatagccacgttatggaacacagtctcgacaggcttagaccagtcttccaccttgtcgccaagatcatcgacacgaacagtcggttgaagcatcacaaccgtttcaccatacggaaaactggtcatatcatatctcccacaaagggccagcgtagccgttaatattcgacccgcacgagcaaccctcaccccacaccgtggaacacacctcagaatgcacatatcgaccattaatagttggagtgatagtgaacgctttaccagccccaccatcaccctcacacaacttcttcaacgcagcaatctcagaaggccacaacaaattcgtgggagtattcgaccgtgtcgtctgagcaaacgggcccgcagactcgtactgcacctgacccgaaaccccggtatcattccagcgcaacagggccctgcgcagaatagccttagcggcatccttatatttgaaatccggtttagcgatacagggggcgacactgacagctacagcctccacatcagcgatcatcgcctcaagcttctctctaggaatatcggcgaaaggctcaatatcctcaggcttcaaaatgatacccatcaacaccaccccctgcacacagtacacattcgcttatcttgtatcagttaccagccggaggaggagtcggtgcagccttctccttcaccacagcaaacgaatcaagcgactcgatagccacatacagcacagcctcggcacgaaccataacctcattatggcccttcaagtcacggccagtctgatccgggtcaccatactcgatcagctcgatcgggaagttacgctggaacccccaatgaacacgagagaaatcaccaacaatagccttaacaccagaggcaggcgacatctccggggcacccgaaacagtcgaagaagcaccaacattcagcccacgccaattatccaaaccagcaaacccggcggcaggatacatcggctgaccggcaagcggagaccccttcggatacacctcagtagacagagcaaacgagaacgccggatccaaagcaacaccgttaggaacctgcaaaccagccccagcgataaggccgacagccttgaccagatcagccgtagcggaatcggtggcatcaaccgtcttcttcgtcttatccagcgacaccttgacagccgcggcaggcttcccagtggcaggatcaataccgtggaaagcaatcagatccacggcgcgaccaatcgaagcacccaaagcgggcgaaataagatcctgaagcacacccagacggtaatcggcgtcagcccacataaactcgtccgagacgcgctgctgagtcacaaccttgataggctgcgcagtaaacgccgaaacatcaacagacgcggaaggcttaacctcaccctcgccaacaatcttggcgcgaggaacaccagaaaaaacggcacccttaacagggccgaaaatagtcggctgctccggcgaaagcttcgccaaaacaccagaatcgatagcacggtcacgaaccgcaccaatcatagaaccaggaagctcaagcttacctgcagaaagaaaatcgtcagccatcagaaatcatctcctagaattattgacaagagcatccacaaacgcgacaccctcacgtcgtttaacatcatcaacgggggcactccccgcaagacggcgcacacccgcgccaccaccactatggtcgatcaaacccttcaaagccttagcagactccaccaatgcttcacgatcgccaccgtgcaagaaagcgaccgcatcacccgacaggccacactcggcagccacctcacgcttcacaccctcaagaacaaacccattaatccggtcttcgagttcctcattcttgcggcgaagatcatcaatcacagaccccgcatcaccatccgaggcgcgaagcttctccaactcggcgaaattacttttagcacgagactcccacttacgggcctcagccttccaatccgtgccagaagaagactcctccttcacggaaacatcaccggcatgatcatcgccggcagcctgcccatccttcacaacatcaacaacgtctccaccctttccgggctcaacagcatcattgtcaacattctgttcttcaactttttgatcggccatagcctaaccctacactccttgcggaaaacaacacaacattgttgacccccgtgcgggagacaaccctgtgcaccgataaccggcggcacacaaccggaaaccatcatctcatgtcgccaacagtacgcatagccttcaaaatattgccaggcgactgctgcaacccatgatcatcaacccactcacgagccttctcatacgtcctctgatatgcggcatcagccctattcggctcccaacgcccaacaacctcaaccaccgtacaaccacaatgatcatgatacttcgaaccaaacggacgcttaccaccacgcttatgacgccgagtatgacccgtagtaagcgcccgctctttagtcgtataatccgacctcgtagccaacatggcacaaaacgcgcacggatcaccatcagtcaccctgcgccacgacctaccctgcgcacccgcagaccactcaaccgtgtcacggccagcattcatcacagcacgatcaaaacccgcagccatcgaaccaatcgtatcattcgccctatccgggtcactcttaagaatcttcatagtcgaaaacgacctagccaacgcggcggcagcatcaaactcgtcatacacgatcaaacccggatccacaccattcaaccggcgaaaatccgacacaaacctggcagccaacgacgccgaaccatcatggccggcacgctccaactccacacacaaacgcacatactgcgcatctgtcatcttcccggaatgccacaaacgaccaagctcagcataatagcccgcatactttccggcaaacctgaccgcctcacgctgatactcagtcgcagcaagcctcgacatagcacccgaagccatcgcctatcaaacctcgttagtctgacgagaaatagccccagccagcgccgccaacggatccgaagactcggcacgatgccgcatcacagcctcaacctgcacatcatccaaacccaacatctccaacaccgtacgagaatcagcaggcaaaataccggcacccacaagcttcgtcacagcatcagccgtagccgcccgagtcggcgtcgaagcatcacgccaacgcaaaccaacatcaccaaaaaacgcggcctcatcaacactcgaatccaacgcccgggcagccaggaaaccaaccgacaaccaaccctgaccaaacgacgtctgcctgcgttcagcacgcttcacaagccgagactcctccgcagccaaagcctccccagaaggcgggttagacgtgataaacccgaaatagcgttccggaacagccgcctcacccgcagtcaactgcgccaacaaacgcatctgatccgaatacggtgtaggagaattcacaggaaacgaccccacattcggagtgtcaccatcatcatccttatccacagcccacacagaagccatcgacaacacccagccaggctgcgaaaactcatccgcgctcacaccagtcacccaacgctgaggatacgcataaaaatcacgattcacagactgccccaacagtgtgcgcacagcctcatccgtgtaagccctaatcgaccgagtgatctccgaacggccatcaatcctcgacgtacggcgacgattcacaacaggcaccaacggaacagcacccaacacattctcaatacggcccgtctcaacccactcacgagacccacgccgctccacctgaacaatcacatcaggcaacaacaactcagcctcaacaacctcaggatcacacgtctgctgcaccacaagaccagcatccaaacgagacccgtcagcagaaaaccggccagtacaattcttcggcgactgcggacgaaccaacaccgacccatccccctggggaatgatcgccacaaacgacaacccaaaaatcagtgcatcaaggtgaacgtcacacgacgccgtagcaagccgattcgcagcatacacaccatccagaccgtagccgtcaccattagtccagccaagccaatccagacgctcctccaaagcatccacagcaataccaggccacgacaccaccgtctgcacacgctgcaactccggcggaatagccacccccaaatcacgcacccgattagagccctcatagtagccctcaatacggcaatgccacgaagacaacctcttaatacgatcgtacatgccctcaatcagagccaactcatccgagttcataccacagacacccgcttcctaccagaccgttcacgccgcttcactttaactgttttcgcaccaagatacgccagcgacacagcctccaaaggaacctcagaaccatccttaaacgaggaaccccaaccccacgcagaacccttcttcttctgcacagccgacctcacagcaatatccaacatgtcacgcctcgaatcagccctagggtgagaaaccacaccagaccttacaccctccaggaacgcctgacacgcctccacataggtgccagtatccgcaaccaccacgccacggcccggaataccacgatccgtcaacgccttctgcaacaacaccgaaccagacccggcaaccatgatccggtcagtatcaccccaacgaaccgccaaccagtcagccaaccggcccacaccatcaacaatcgttcccgacaggccatcaataacctcaacatgaaccccagcatcagtccggccagcacccgccaaagcaacccgatccccagaacgagaaaacgagacaccaaacactttcccgccaaccagactcgcctcatccaccgcagactgagcccacttatccgccggaaccacagacgcagcagactggccacgatcccaccagccaagccgctcccgagcaaaacccgcagcagacatcgactcatgctcatcgcttacggtcccaaaattcagacgacgccccaacgccggattagtgtcacccgccaacttccgccactgccgcgacacatcatccggatccgactcgtcaggaatcgaaaactccgtccacgcaaaccttttaccgccaccaagcgcctgcccacgcaaacgcaacaccacagacccatcagccaacggcccaggcggcgtacccaaaaaaatctgctgcggatcacccgaaggagccgcagacaccgtaggaagcaaagcctccaactgctcatccgacaactcctgagcctcatcacacaccaaatcatcaaccgtaaacccgcgagccgaaccacgagaacgggccacaaactcaaccgaaccccaacccggacaaccacacttcttctcaaaagtcggacaatccggatgatgcaacacaatagcctcctgaccattcgtcgcccgaatcgacttcaccatacgatacaagtcaggaaactgccgctcattctcaaaaaacgaacgcaaccgcataaacgccttacgagccgacttcaactcgtgagccgtatgcaaaatacggcgaccctgaatagtcgccttaaacaactccacaatctccaaaatagcattcttgccattctggcgaggcacaaacaccccacacacacccgaagcaagcctgccattgctaccaacagcaagccaatcatccaacacctgctgctgccacggatcaggcgtcaacccatacgcacgacccaactccccagcatcaccgccagcagacaccgaatacgccgcagccacccggtgacgaggaacctgagaacccacaacaccagacacctaatcaggcccccctgcgcttcctataccggtcaatcatcgccaccgcagaaccgccaccacggccaccagacaccacatcaaccgaataccgatccaacatacccataaaagccttcacatgagcacgcaacgaagccaccaaatccgcgcgaccctcacgccacacacaatcatgaatcaccgcagcatccatgagaaacaaccactcctcatcagacacgtactgcgcgcgactatcctcaccccacacacgccaccaacgacgcgtctccccacaccaatcacgaccatcaggaagctcaggctgcacaacactcaccaccaacacaaaaagtcgacaaacatacaaaaccacaaaagggaggtatttcactaagccgtacgaggtcttgcacgggtgtgcagggggtgtccccggtgggggttggcgggtttttcaccatggaatcaatgtttttgtggtttgttgttggaatgtgatgtttggttcgctgcgattgcctttgcttctgttgcatgttctgcagatgatttgcccgttgtcgagggtgttgagtcctcccctgctgacgggtgtgatgtggtcggcttcggggctggttggcaggtcgtgtgtgccccaggctatctgggctccgcagagtgggcattcggtttggccttgctgtcgggcttgggtgatgagtcttgcccgccagcgccggtgggcttggctggctgtacggttggtgcgtgccatgatgtgtctgttcctcgcctagccctgtacgggtcttatttgcccctctaccggcctgggaaccgttggggtatgaataccttgcccttgccctgctgatcgatcctaggggcctttttgttcgtttgagggggtgttctgttttgtgccggggtggttgttttctccactaccccctggcatgtgaaaaatatcacatcaccccccagcggtgtcaaaagaagaaagacacgaaagaaaaaagggggtggatgggtgttcgcgtttcacagcttagcgctgggcgcctagcgctaaaggacacaggctaagcgggaacaccttaaggttttaaagtcttctacatataatatacactttaagtctcacccggtgttaagggtgtgagcgtgacacgccgtacgccttcagccgaacacgccaagcctgaaagggacacaggtagagtaagtgtggtgagtgtgcaaccgggagcgtgcgaccggtggtacacgagacacacggtgaaagcccatcagcgttgacggccaaaggttcctcttctcccctgatgaagaaaagaagagaagagagaaagaaccaaagagagaagagaagtaaagaagttaaccccttatctcttctaaaacttttataacctataagctttaagacttataggttataatattaaagtttaagactgatggttaactttaagtacttaaggtctttaagtcttaatagttattttaagttttaaagtcttaaacactgatgtgaagtttatatccttaagtactaagcctttaaggttttatacttaacttaggtgttaagatctttatactgatgctgagccttgaagggctcagtgctaagtgtgtaagcctttaaggttattaattaactttaagtgctaagctcttaaagtttacttaaagtgtttaaagctttaagactgatgccgagcccttgaggggctcggtgctaa

SEQ ID NO: 9 - DNA, 29335 bp, Propionibacterium acnes bacteriophage
acgccaattatccaaaccagcaaacccggcggcaggatacataggctggccggcaagcggagaccccttcggatacacctcagtagacagagcaaacgagaacgccggatccaaagcaacaccgttaggaacctgcaaaccagccccagcgataagcccaacagccttaacaagatcagccgtagcagaatccgtggcatcaacaacattcttcgtcttatccaacgacaccttgacagccgcagcaggcttaccagtagccggatcaataccatggaaagcaatcagatccacggcgcgaccaatcgaagcaccaagagccggagaaatcagatcctgcaaaacacccagacgataatccgcgtcagcccacataaactcatccgagacacgctgctgagtcacaaccttgataggctgcgcagtaaacgccgaaacatcaacagacgcggaaggcttaacctcgccctcaccaacaatcttagcgcgaggaacaccactaaacacggcacccttaacaggaccaaaaatagtcggctgctccggcgaaagcttcgccaaaacaccagaatcgatagcacggtcacgaaccgcaccaatcatagaaccaggaagctcaagcttccctgcagaaagaaaatcgtcagccatcacaaatcatctcctagaattattgacaagagcatccacaaacgcgacaccctcacgtcgtttaacatcatcaacgggggcactccccgcaagacggcgcacacccgcgccaccactactatggtcgatcaaacccttcaaagccttagcagactccaccagtgcttcacgatcgccaccgtgcaagaaagcgaccgcatcacccgacaggccacactcggcagccacctcgcgcttcacaccctcaagaacaaacccattgatccggtcttcgagttcctcattcttgcggcgaagctcatcaatcacagaccccgcatcaccatccgaggcgcgaagcttctccaactcggcgaaattacttttagcacgagactcccacttacgggcctcagccttccaatccgtgccagaagaagactcctccttcacggaaacatcaccggcatgatcatcgccggcagcctgcccatccttcacaacatcaacaacgtctccaccctttccgggctcaacagcatcattgtcaacattctgttcctcaacactctgatcggccatagcctaaccctacactccttgcggaaaacaacacaacattgttgacccccgtgcgggagacaaccctgtgcaccgataaccggcggcacacaaccggaaactacatcaaattatcgcatgccaccaacagtacgcatagccttcaaaatattgccaggcgactgctgcaacccatgatcatcaacccactcacgggccttctcatacgtcctctgatactcgacatcagccctatttgattcccaagggccaacaacctcaaccaccgtacacccgcaatgatcatgatacttcgaaccaaacggacgcttaccaccacgcttatgacgccgagtatgaccagtagtaagcgccctttccttagtcgtataatccgacctcgtagccaacatggcacaaaaagcacacggatcaccatcagtcaccctgcgccacgacctaccctgcgcacccgcagaccactcaaccgtgtcacggccagcattcataacagcccgattaacacccgcagccatcgcaccaatcatatcattcgccctatccgggtcgctctcaagaatcttcatagtcgaaaacgacctagccaaagccgccgcagcatcaaactcgtcatacacaatcaaaccaggatccacaccattcaaccggcgaaaatccgacacaaatctggcagccaacgctgccgaaccatcatggccggcacgctccaactccacacacaaacgcacatactgcgcatctgtcatcttcccggaatgccacaaacgaccaagctcggcataatacccagcgtatttcccagcaaacctgaccgcctcacgctgatactcagtcgcagcaagcctcgacgcaacacccgaagccattcatcaaacctcgttagtttgacgagaaatagccccagccagcgctgccaacggatcagacgactcagcacgatgacgcatcacagcctcaacctgcacatcatccaaacccaacatctccaacaccgtccgagaatccgccggaagaataccggcaccaacaagcttcgtcacagcatcagccgtagccgccctggtaggcgtcgacgcatcacgccaacgcaaaccaacatcaccaaaaaacgcggcctcatcaacactcgaatcaagcgccctggcagccaagaaaccaaccgacagccagccctgaccaaacgacgtctgcctgcgttcagcacgcttcacaagccgagactcctcggcagccaaagcctccccactaggcgggttagacgtgataaacccgaaatagcgttccggaacagccgcctcacccgcagtcaactgcgccaacagccgcatctgatccgaatacggtgtaggactattgacaggaaacgacccaacattcggggtatcaccgtcatcatccttatccacagcccacacagaagccatcgacaggacccagccaggctgcgaaaactcatccgcgctcacacccgtaacccaacgttgaggatacgcataaaaatcacgattaacagactgcccaagcaaagtcctaaccgcttcatccgtgtaagcacgaatagaccgagtgatctccgaacgcccatcaatacgcgacgtcctacgccgattcacaatcggcaccaacggaaccgccccaagcacattcggtatacggcccgtctcaacccattcacgcgaaccccgccgctccacctgaacaatcacatcaggcagcaacaactccgcctcaacaacctcaggatcacacgtctgctgcaccaccaaacccgcatccaaacgagacccgtcagccgaaaaccggccagtacaattcttgggtgactgcggacgaaccaacaccgacccatcatcccggggaataacagccacaaacgacaaaccaaaaatcagtgcatccaaatgcacatcacacgacgcagtagcaagccgattcgcagcatacacaccatccaggccgtagccgtcaccattagtccagccaagccaatccagacgctcctccaaagcatccacagctatcccaggccacgacaccaccgtttgcacacgctgcaactccggaggaatagccacccccaaatcacgcacccggctcgagccctcatagtagccctcaatacgacaatgccacgaagacaacctttggatacgatcgtacatgccctcaatcagagccaactcatccgagttcataccacagacacccgcttcctaccactacgctcccgacggccacgacgaacacgtttagcccccaaaaacgccaaagacacagcctccaaaggaacctcagaaccatccttaaacgaggaaccccaaccccacgcagaacccttcttcttctgcacagccgacctcacagcaatatccaacatgtcacgcctcgaatcggcacgaggatgactgatcacacccgaacgcacaccctccaggaaggcttgacacgcctccacataggtgccagtatcggccacaatcacgccacggcccggaacaccacgatccgtcaacgccttctgcaacaacaccgcaccagacccggcaaccatgatcttttcagtgtcaccccaacgaaccgccaaccagtcagccagctggcccacaccatcaacaatcgtgccagacagtccatcaataacctcaacatgaaccccagcatcagtccggccagcacccgccagcgcgacacgatcccccgagcgagaaaacgaaacaccaaaaaccttcccgccaaccagactcgcctcatccacagccgactggacccacttatccgcaggaatcaccgacgaagcagactggccacgatcccaccagccaagccgctcccgagcaaacccggcagcagacatcgactcatgctcatcgcttacggtcccaaaattcagacggcgacccaacgccggattagtgtcaccagccaacttccgccactgccgcgacacatcctccggatcagactcgtcaggaatcgaaaactccgtccacgcaaaccgtttaccacccgacaaagcctgcccacgcaaacgcaacaccacagacccgtcagccaacggcccaggcggcgtacccaaaaaaatctgctgcggatcaccagacggggcagcgctcaccgtaggaagcaaagcctccaactgctcatccgacaactcctgagcctcatcacacaccaaatcatcaaccgtaaacccgcgagccgaaccccgactgcgggccacaaactcaaccgaaccccaacccggacagccacacttcttaccacccacacgacaatcaggatgatgcaacacaatcgactcctgaccattcgtcgcacgaacagccttcaccatacgagccaaatccggatagcggcgctcattctcaaaaaacgaccgcaaccgcataaaagccttacgagccgacttcaactcgtgagccgtatgcaaaacacgccgcccctgaaccatcatcttaaaaagctcaacaatctcaaggatggcgttcttcccgttctggcgaggcacaaacaccccacacacacccgcagcaagccgcccagtagaagcaaccgccaaccaatcatcaagaacctgctgctgccacggatcaggcgtcaacccgtacgccgccccaagggcaccagcatccttgccggcagacaccgaatacgccgcagccacacgatgacgaggaacctgagaacccaccacctgagacatcaagcacccctacgcttcctataccgatcaatcatcgccacagcagaaccagcaccaccaaaggtaccagtgtcagcatccccagaacgagcctccaacatggaaaggaacgtcttcacgtgcgtccgcaaagaagccaccaaatcagcacgaccctcacgccacaccgcatcatgcaaaaccgcaccatccaacaaaaacagccactcctcatccgacaccaacccggcacgcgaatcctcaccccacacacgccaccaacgacgcgtctccccacaccactcacgagactcaggaagctcaggctgcacaacactcaccaccaacacaaaaagtcgacaaacagacaaaacaacaaaagggaggtatttcactaagccgtacgtggtcttgcacgggtgtgcagggggtggttcccgtggggtttgtgggtttttcaccatggaatcaaggtttttgtggtttgttgttggaaactaatgtttggttcgctgcgattgcctttgcttctgttgcatgttctgcagatgatttgcccgttgtcgagggtgttgagtcctccgcggctgacgggtgtgatgtggtcggcttcggggctggttggcaggtcgtgtgtgtcccaggctatctgggctccgcagagtgggcattcggtttggccttgcttgcgtgcttgggtgatgagtcgcgcccgccagcgccggtgggcttggctggctgtgcggttggtgtgtgccatcacgccccctgatctcctatggcccctgtgagcctctcattgctcctgtaacagcctggaacgtgttgggggtaggaatactctaccggtgcccttctattcgatcctaggccctgttttgtgcgtttgagggggtgttctgtttgtgctggggtggttgttttctccactaccccctggcatgtgagaaatatcacatcgccccccagcggtgtcaaaaagagaaggacacggaagaaaaatgggggtggatgggtgttcgcgtttcaggcttagcgcctagcgttaaaggacacgggccaagcgggaacacccttaaggttttaaagtcttctacatataatatgtactttaagtcttacctggtgttaagggtgttggcgtgacacgccgtacgccttcagccgaaaatgccaagccgtaaagggacacgggtgtcagagtgtggggagtgtgcaaccgggagcgtgcgaccggtggtacacgagtcacacagtgaaagcccatcggcgctgacggtaaaggttcctcttctcccctgatgaagaaaagaagagaagagagaaagaaccaaagagagtagagaagtaaagaagttaacctcttagctcttcttaaacttttataacctataagctttaagacttataggttataatattaaagtttaagactgatggttaactttaagtacttaaggtctttaatgttttatagttactttaagtgtttaaagcttataagcctttaagtattaataattactttaatctgtaaagtcttaaacactgatgtaaagtttatatccttcagtgcttagcctttaaggttttatacttaacttaggtgttaaggtttaaagcttttaacgtttaactttaagtgtttaaggctttaaggctgatgccgagcccgtgaggggctcggtgctaagctatcagcaccttagcgctaagctcttaggtctttaagtgtttggtagactgatggtaagcgaggttgggaagtgcgttagcactttccggccttgcgtccagctggctacctgtccagcctatcataccccacctgggatgagtcaaactggtggttttggctctataggcgggtttgaggggtgtaaacgggtgtttttggtagtaaaggtccaaaaattaaacctaaacttttccttaaattttcttagagtcttgtaacctttgagagcttttaaggctgaaacccctagtcagaacgggtttcactcccgaacggctgtcacactggactcttgtgttctttccgaacacgctaggctcatcagtgctgagggtgttccctcaggctttcgagtactcgtcgctagggctcctcgtactctcaagccttccctgatggcgtgtactcctttcagtgctgtgcctgttcaggctgatgccgagcccttgagggggctcggtgctaactgctaagaccatcggtgctaagcgctaagaccttaaggcttgaaggctgatgctcccccctctttcttttaccgtgtccttcttcccccttagcatcccacactgtccacatagttgaggcttagctaaccaggataaggattgatggtctatgctgagatggttgatcgtgtatcgggctctggggggcgtctagaatcgatcagaatgtgctgggggtatgaatacctagcccccaccctgtaaggcgcccctaggcgccgtgtgaaggctttaaacggcatttctggactacgccctccacgctagattggcagagtggcctcgagggtgtacactaagccaggagagtgtgatacatctcacacatctagatgatagatcttatgtctaagcccggcaccttgactcgctagatcatctgccacacccgctatcacccagacatacccctgagacgccctgtatggggcctagaatcgatcagcggggtcaatcctatataatcctacccccagaagatttgagacgctgggagaggcaataaaggcttaagtgacatctgtcacacccgacacacccccatgaaacgctcaatccaaatgagcgtagccttgactgtggggtaacagcccgcacactctagaaaccacaacaacccctacaccaccgaaaggagcacacccatgaatggcacactcatcacaccatccttcacatccctctacaggcagacagaaatcgaccccctcagcctccacagcctcaccggaaaccattcagacgacatcctggtcgcatccacccgataaaaccatcaacacaccatcaccagaaaaggaatcatgatgcagaagatcgccaaccacttcacccagctctacacccccgccagctacgactgccccacacccttcgacctgacacgcctcgaaaacctctcctgcgaccacatggattttgagggcctcgccgaagcctaccgacagagtgtggaagccgaactccacaagctacgccccaacacgtttatcgccactgatggcaccgtattcagccacaacgagtggaagccgctcacgggcggtgaagccacgcaactctactggaatgtgagccgcatcaatgttggccatctactcaccctgtgtgcccgataaaacccctagccacacaccaaacgctcacaatcgttgagcgcagccttgacagtgggcccagccgctgaaagtattaatcatgtaagcaacgaacaacaccccggaaaggggacaacaatcatgaacaagaaaacaggctacaccatcgccggaatcatagccgccatcatcgccgccgcctcattcatgccagccccagacgacaatccgccactcacctcacagccagccccacaggcaaccacagccaacaccgaatggacccccaagactacccaacagcgcaaagccgagaaagcggcacggcaggcagccgccacccgatccctacaagccgagcaggccaaagcccacaagcaagcccaagcaaggggtgaagaaaccgccaccggactcaccatgatcaccgcggcacacgcctgcaaccgcaaagccgaacaacaggccgccgcacacggtgtcaaatggaacggcaaccccgacatcgacctccaactccacaaaattattggcaaagacaccttctccatcgtctacggcgccaccgtccgccagccaggagcatccaaactaccagtcaccgtccactgcctcgtcaccggaacagaagaacaccccaacgtcaccgacctcaacatcaacccgcaacagtaacccgccaaggagcatccccactatgcctctcctctcccactacgctgtcaccaccggactcgccgacacggcacacattattcaccacaccggcggcacactacgcacagccaccgacatagcctcccgcatcaacaccctcaacccagacattgatctcgaccaccaaatcaaccaactgttatctatcgaaacagacctgtacaacatttataaaaccatcaacaccattcttcaggagcaagcatgaacacacccaacaacaacattgagctacacagttacgaaactttcttcaccagcctcgcctggatccaaggcggcatcatcacatggatgtacgcaaccggcaccagccacaaagccgccctcgccatcaccgccgcatgcgccctcgccaccctcctgggtgcctcaaccctcacctaccatccccgagacactcaatgatcacaacacctatactgatagccgaaaccctcgccatcattattctcgcagtagcactcgcccacgacaacaaccagtaacccacacttaaggagcgcacaccccatggatgagccaacccgcatgtacaccgaccccaacaccggtgcccaaaaagaactcaaacaatgccgactgtccctcatcgaccctgcagccttgcacgccctaggctctgtggcaggctacggcgccaccaaatacggcgacaataactggaccggaggatacccgtggaaccacagcgtcgacgccctctaccggcacctactatcatggcagcaaggcaacaacctcgaccacgaatccgggctaccgcatctagcccatgccgcctggcactgcctcgcactcctcgcataccagcaacaccaggccggccaagacacccgcaacccatggaacaaaagcgacaagtaatgcctctagcacaaaaaccgtccaccatcaaccatccaggccacatctcctacagctcactcacccagtgggccgaatgcggagaaaaatggcgcctccaacacggatacaaagccacctatcacacctggtatgccaccatcgccggaagcgccatacaccacatcaccgaacaatacgacctacacctgtacaatcccgccgaataccctgcactgccagacaaactctcatccttcaaaaacattttcgccacacaagtagccctcgccgaatccgaaggcacaaacatcaaaccctccggcagaatatgcaaaaacatgtgcgaatcgggcgggccacacaaaaaagactacaattggtggatggtttacggccccacctttgtggacaggtggaaaacatggaggcgcaaccacccagaatacgccaccgctgttattgacggcaagccaggcatcgaatacccggtagaaaccaccctccaagacggcacaaaaatagtcggctacatcgaccgggtattcaccgacaccgacaccggtgaaaccttcatcctcgacctcaaaaccggacgcctacccgccgacagtatgcagctgcacacataccggtacatgctagaacaacacgacatccatgtgacgaaaggcatgttttggacgccagccaccagtcgcaacgacgacaagtccccaatacagggcacatccaccgaactctacgaccttgacaacaacacctaccggcatgtatcatccatgtatagtcaagcaatgaaaggaatcagtcaaggcatcttcgtaccccacgtcacagcactctgcaaaggatgccccgtcagggacgcctgctgggctgtagacggcaaaaactcgtacagatacccgatagaaaccaccgtacagtcaccccaaacagacaataaagaaaaggaaaacaagtgacagaagagcacaccacagacaatgatcgactcactatcacactcaaatatggtggagactatgctgcaccatggaccgtcattaggggagacacagcagagcagacaaaacaggccatcatcgacctgctaggaggattgaaagacgaaaccgtatcgaaagactgggacctcgcaaccctcatagctagcgcatccatcattctacaagaccgatacaatcaggccgccaaagactacgtaaacaaaatcgccaatcaggaaaacgacatcatcattgaccggatcaacaaagccaccagcaaagcacagctagcagaccttctaaaacagtacaaaaagattatcaccagccatagcgacgtgtcagaggctttccgcagcaaacgaaacagcctcacccgataaaaccgacacaaaccaacacaaacagtaaaggaaacaacaatgggactcgcaaactaccgaaacaacaacagcaacagcaccttcttcaacccctcccgaaaccaggatgccaccgccatcgccttcaaaatccgcgacgtagaacacaacaccgaaggctacggcggacaggtcgccgatcgcatctacgccgatgtcaccatcttccacaccctagacgatctcaacaacggcaccccagaaaccatccccaacgctattatcgagaaagcacgcggcaacaacgaccgcccacactccatgatccgcgacctcgaagcctaccttggcgaagaacaagccttcaaactcgccaccgtacgcaccaaaaacggcttcaacgcggtcgtactcaaacccctcgacgacgccatctacgataaggttgccgaatacgtcgacaagcgcgataacggccagctagacgacaccacagcctcaactgatgctgacatcgacatcgactccatctgaccaccaaaacacacccaaccgatagatagataaaggctccgatgctctctctacaacgatccttcgagagagcctcccaaaccgctgccgagctgccccgcataccccagctagaacccctctaccgcaaccaggacatgcacatccacaaaggggacctagtcatgatcgcggggcgctccggcagccaaaaatccgggctagccatgttcatcaccgccatgctcaaccagcccgccctctacatatcaggggacatgacaccctgggaggcctccacacgaataatctcactcaacacccaacacaccaccacacagatacaacaaaacatcgacgactacgggccagaatactatcgagacagcatccaccacggccaacacatcacattctcgttccagtcacccatcacatggaccgacatcaccatggaattgcaagcctacatggaaatgtggaacacctttccccccatcgtcgttatcgacaacctgatggacattcaagactgcgagagtgactatcaggcacagcaagaagccatgcaatggatcacagcattgggcagggatactggctccaccattattgtcacccaccacgcaaccgacaaaaccggaaccgacatcgaacacccgccagcccggcgagaaatcaaaaacggcctctccgaaaaaccacaactcatcctcggagtctcattgtatggtggcgaagacaacggcaacgggctatcgataccagccgaggctcgcatcgccgtactcaaacagcgcacaggcaaatccagccccgacggcacccgatacgaacgactgcgagcctaccccgaatacacattcttcggacccctcgccgaaaaacagccctggaacatgaccacaacacacaaaggactatgatggccacacaacagtcacgcaaccggcgggccggagccgaatgggaaacaagactcctacaccagctacgcgacaccggctatgatattgaacgcctccacctcaacggtaaagaggacgaaggcgacctcatcctcacaaccgtccataaaacctacattatcgaggcgaaagccgggcaaccacacctagcccaattcgtgaaacaagccagccgggaggcacgcaactacgaaacccaccgaaaccgagaaagtcagtccaccatcggactcgtagtgatgaaacagcgcaacaagccatggagcgaagcctatgtggtatcaaccctcaacgagctcctcccacacctctgacacctgctgcctcctcgacacctaccggatacggtacaacccgtccaaaaacgagcaacacatcctctgcccgttccacgacgaccaccagccctccatgagcatcaacctcgacaagggcgtctggtactgccacacatgcggtatcggaggcggactcgccaaactacaacaacgattagagaaagaaaacccgaatgtacgacagcatacgcccatacaacattgcggaacgccgccgaatccagaaagcctcggccctctacgaaacccacctcgaaaacattctcgacctgctctcggcaagaggcatcagcgaagaaacagcccgctaccaccaccttggatacatcgacaatgaccccatacccggccacgaaaactacaaccagtgcatcactatcccatacatgtaccccgtctgggaagggtcagccgaaatacgaaaaatgcgtttccgctgctcactcccgcacgactgcaaaacccacaaccaccccaaatacttaaccccggccggggacacaggctccatctacaacatggccgccatggccaacccggcagccgaaatgcacatttgcgaaggcgaattcgactccatgatcctcgaacaatgcggatggtcggccgtcgccctacccggcgcaacctcgtggcaaactttttggaccaaattttttgaaggctacgaccacatctacatatggtccgacccagaccctgcaggcgacaagatggcccaaaccatccaaaccgcgctcccccaagccacccatgtgcccctcaccctgggggatgtcacagacacctacctgcaggccggaaaaacagggttgacacaagcactaaacacagtgctacaataaaaccacacaagcaacctaaaccaagaaaggtacactaaaacatcatggatcccctcgacacgtgcccaatccccaaccggcgcaacaccagccaaacagccaggaggcgtatccgcctcgccatctgtgcagaaaaatgggctgatggtgaagaccccacctacatcatgcacacctggggcaccacctatgatgggatgcgatccatgatccgcgccaaccccgacattaaactccccgacgacatgaccaaacatttgcacaaagtatgccgggaagcctaccccaaaaaccagccaaataggcaccgaagcggatgggaccaatacgagaaggaatactacacccacgaaatcctcttcctgaaccaattcaacatcccagccatagaaatattggaccggctagacgtgtcatggacaatgtggaaacaaatcatcaccgaaaaccatctcacccggctacaagacgaaacctacaatgcgtgccactggtactatctgaaacaacaacacccagactggaccgaccagcaaatcacccaagcccaacacgccgggaacaacaccttcaaccagttcctgcaagacgaccagccggtgctatcgtgagtatctcgttcaaacccaccatcaaagacaaacacgccatacgcaacatcattgttgaagaatggcttaccgaaaaccaagcacaagacattcccgatagtgtactacagcacattatcgaatactgctggaacaccttcacagccagcaaccggtacgccgtcgcagcgcaatactggcgaggccaaaatccacccgacaacgagcaccagcgcatactagtcggctactacaaaaccttaaaacaggccgaaaacgcggccaaacaattccactggaacacccggatgcaacaacaatggaaaacatggatactaccagtccacaacggcaccgtatccgagcatttcaccaaccagaaaacactcttcgacacacaaaccagcaaccagagtgacggcgcactgcccgagcatctacaaaacatcatgtgcggaaaaatactccaccacacagacggaacaacatcgtggtgcacacgcaaaccaggacacgacggcgactgccgcacaggatggcagcccaccacacaaccgataggacaccatggcaaccaaaactgaaacgttgatccaacgctacggccgcaaagccgccgacgtcctcgccgacaggtctatacccgccacacagctagcccgaatgctcactgaagccggataccccatctccgccaccgtcatcaaagactaccgccgcaaacaagccaacaccccgcaaacagaagaggaggatacccagtgatagacaatatagaccggctactcacacagctggccaaccacgacaacgccatcgacaccatcgacgacaatctagccaatggtaccgtgcgccgcacacgcatctccgaatggacactccccaacggagaaaccggccgatccgtacaaaaaatcatcgaccaccaacccgcaacaaacccctacccggtggatgaactcgttgataagctagccgaatggacacccccaaaaccatccgacaacacccacaccgactacagcactgcagcgttcgtcatcggggcaggagacttccaaatcggcaaaggcatccccggaggagaaacagcacacttcgccgacgactatttgcactccctcatagtcgccaaacactactggcaacaggcaggcaaacctgaacgagtccacatcgcattcctcggcgacatgatcgaaggatacgtgtcgcaaggcggcaacaacgcctggcgcacacaaacccccctgacggaacaaatccggttgactcgcatggccatgatgcaactcatccaccaattcgaccactgcaaaaatgtgaccatcacatccatccccggcaaccacggagaagccgtacgcttcggaaaaggcgtcaccacctacgacgactccttcgacgtcgactgctgccgcgccatcgccgaagcctaccaactcaacaaccaataccccaacctacacttccatttccccagccgagacgaaatgaccaccaccgttgatgtggcaggcacacggatactgcacgcccacggacaccaatggcgcaccggcaaacactatgattggtggcgcggacaagaattccacaacggcaccacatcccatattctcatggccgggcaccggcaccacctagaaatctccgagcaaggacaacgcaccttcatccaatgcccatccatggaaggcgaatccacatggtaccggcacaagacaggcaccaccggaaaccccggactcgtgtgctacactatcaacaacaaaacaccaaacaactaccagatagcaaggtaatagtgccatgagtagacgaccaacaaaagccgacctagccaccaccgcatcatgggtgtgggccacagaccatcatctacgcacactcaaccgggcatgcaccaaaacagccgcacactaccccgcaatcagtgcagacgacctgtaccaagactctttgctatatattgcggtgcgggaacaataccacaacctagacaacaaacactacaccaaaatgtgttacagggtagccaaacggctagccaacaaaaccatacaacacctagaccagccgaaacctttacccgatattattcatctagccgacaaccaaaccagcatttaaaaggagaaccccccatggttaaaaccaccatcgacgacggaacacaaaccaccaggctacaaacagtaggcgccaccaccacagccatcatcaccgacaccgaaaaccccgaaaccatcaccgccaaatacaccatcagcaaagacggcacagccacctatagtatcagcggcaacacctatttgggagaccaccaacacattattaaactcatgtacgactactgccactgcgtcggacgattcgacaccaccaccagcaacgacctgttcagggggtgacacatgaaccgaacctacaccaccgccgacattattcaagccgcccaatggatctggaacggaggcccatggaaaccgagcgtcgaaccaggaatgccacccccaccaaccgcaccacaacaccacggcaacaacatcgtctccatgatcgatctacagctagccatcgacgactacaccctatcatgtgaaccctccaaacagcgaaaacatttagctaggttagcagcattccgggaagtatacggatacgaccaaacctacgccacagccgcccaacgattgggtgtcacccggcaaaccgtgaaacagtgggcagaccaaacactgatgacgttaaccgagtacgcaaacagcacatactacatgccagacgataacgaaggaatggcataaaaaccatggacaacacacacaatatcacctacaccaccctcaacacagcgatacaccgcatcgtccaacaacagcccaccaacatgcaacagttggaaaaaattgttgcagatatcgaaaaccagtacggtgtacccatctccctcgacaacgtgaaccttaccgtcaacaatgtcagcctcgacgatcttgctatcgaccaggacacgctagacgagtgcagcgaaatcctatggctatgcgacagtgcaggacaccccacaatcaacagcaacacccgcggcaacagcgaggaccagagcccctatgcaagccaggaagcactagactggctcgccgggatcgcataccaggcaaaactattacaatcgtcggcagacgagatcatgtgggctatcatccgccaccgcgacaaccacaaaaacgttatcggccggaacgttctagaccaggccagcgaaactatctgcacctgcctccacctgtaccagatgctcgaagacaccatcgacagcaacgaatcatagccacaccgcaatatacaaaaatagtgccccagcggcaaccaccacacaatcgtggcagcaccgctggggcacacatctatattcacttatgcaacagtagactctaccgtgccaacctccgactcggcagcacgccgaggctcatagcctacaccaagatccgcatcgtctacaggctcaatcatgccaggatccgacacatccaccatgtgaggctcaaccatacccccatcatccggtggaaccaaacccgcatccacaggcgtggttttaggtttgccggccacaaacgacgggctaccaaacgaggtagcaaccgacaaaaccgcagcaaccccggccgtaatcagggcagactcccacggcaaaccgcgaaacgactccgcagtatacgtgacacccgccgtcaccccaagcacagcaacaaacgtttgaataaaagttttcagggcacgctcaaacaagcccaaccaaaactgtttacccataacacaccaccatcactttttcaaaccgttaacagtcgactcaagcctactgatgcggctgcgacactccagcacgtaataccagacactccacaaagcgtcttttgtgcgccacagcttcccggtcacaggattcttcacccacgacagggcgtcaacacgtttacccaaatcaccattctgtacctgcaccacaccaacatcatggtgcagcttattcaccgaaccagtaagctgagcagacaattgtttaatctgatcatgcaaggctttcacatcagccacagttaactccccactctcatctttgccgttgactacggccataaatttgtcccacggaaaccatggccccggatcatcgtgatccgactgatgccacgcatccgtcacatccacgtggccacacacaccacgcctacccgcttttagatcggctgcactaagcttccttttcggaacattatatttgtcacacaactgccgacacaggatagcggccctctccaccgcgggccacacgcgaggatccagccactgctccctcgtgtaagcatgccccggcacccggaacgaggcgtgcgaacccccatccgcgcaaatctctatacccaaactatgcggattcggcggggcatgccaccctatagtagactccgacaagcactgcaccgtctccccaatatcgcaaacataatgcgccgaaccacccgatgatggggaagcaaaatagtttgccgtagacacagccctacccttacgcgaggcagacggaaaccccacatccgggcatgtcgcatgaatcaccaccctattcaccggactattcgagccgcttgagtgatgcgccgcaggaataaacctcacaacatgtcaccaccaaacactaccatcacagccactcctttctatttgtgggatgatatagttactataggcgacggtttcacaccctggcaggccaccgagcccgatattgtagaagccacaccgtcactatatttcacaaccaggcgacccccggaacagtacacagacaccaccgagcgcccatccttaccatctttaccatcggatccgttcacaccggcggggccgggctcaccgcgttcaccctgtgcaccttgcgggccggcaggacctgaagggcccacattaccgcgttcaccggccgaaccatcccgaccatcagcgccgttaaccccgttcacaccgtcagcacctgcacgacctggagcaccatcacggccatccgatccattcgcgccaggcaacccggcaggacctttcacaccattcaaaccgggagaaccctgcggaccaacagggccaaccagcccagccgaaccattaacaccatcccgaccatcagcgcctgcaggtccttgcgggccgcgctcaccggcaggacctttcacaccctgcacgctacgctcaacacgctgagcatccacacacaagccagactggtgaagccgcaccgactcttgcccgccagaggcacacgcctgcttcacacggctggccaaacccctggcggctgtaccattcgactgggccctcgcctgctccgaatcccgctcagaggatacggccccgaaacgcaaagcacccacagcaaccaccatcaacaacataagcgacaaaaacaacagtatcagggaagccttctcaaacgagcggcgctgccgtttctcttcctccaactccctcacaattcaccccccaccaccatcaacagtatccttcaaaaactcgggcaaatcaggcatcttgacaggctcaacattttcaggcaaattcgcgttatagcgatgaacaatatggcgaatattccatgtgtattcttccatcgcatcaacctgcgcagacagctgcctaagcctcttcttcgacctgtaagtaaccgcctgaatcgaaccaaggacagtagcgatagcggtacaaatagaggctacgagtgtgggtgtaagccatgacactacagccccctaccactacaaccaccacaacatatcccgcacacacaagccgcgcattacacgccgacagcaatccagttagctaccgcaggcacaccagaaggcttagacccgtcattcgtgataaacgctaaaccaaaatccttattagtaatattgtaggcttttacatcaatctgtgccgtgcccccagctgccgtagccatagacgccaccaccacaggcggactactaaactggcgatcaaacgggatcgtgtaagcatacacagcagacccgccaaacatgatcgacttcgaacccgtctcaatcctgggggacaacaacatccactcgttagcatgattagcccacacagcccccgaaggaaccatcacccggtcaccctccacagggataggatcacaagccgcagactcgccaaacgccacacgggccgctatggcacgcctatccaactgctgctgcaacccgttagacgacaacaccaaagtcgccagaagctgctgatgatacacgccaggctcggcacgcaacacatccctggcacgctccgaacggccaccgggaacaatctccaacttggctgtgttcgcctcccaatcccgagacaacaccacatagtcgtatcgggtctcacccgggcccggaagctgccccgtcaccgtctcaacactattcgacgtgcacatcaccccgtgagcccaagcctgccccggcaggacctcacacaacactgtggcaccctgaatcgtcgtgccgacacgaaaatcgtccggccccttcacagacggcatattacccatcagaccagacatttgagcccaatcatactcggtcaacacaccatcaaaccctttacacacaatacccacaacaaaccccaatcacttattaaaacttttgcaaatcccgcacaccagccgccaaaccagccacacgccgtgctagcaacgccgacggattatcctcataatccccagcaacaggtgtcaccttcgtccacccatccccaggcgatacacactccacatcaatctgccgaacaatctccgcaatagggccagaacccacatccacatagatcaaatcaccgggcatcagattgccgggcccaaaccgcaacacatccgactcagccaactcgatcttaaaccccgacgtagcccctaactcggacaacacccgctcagcctcatcaatgagatgcacatgttcagaatccgtgttacgggcatccttaaacacctcgacacgatcaaaccactcatcctcggccaacgcgtcaaaatcctcgcaaaacagccgatctttaccctcgccgcggccacccaccaccaccgacgtagccttcggggcgtcacgcacatactcccacgacacaatcgaaccagactcggcagtcaacacatgcttccgggtcacagcaggcacacaatcaaacagtaaaccacgctgatccttcaccttattctcaaactggttcaccgtgacagtcatccgagcccacgacaacaccggcaacaacttatcggcaaacacgtgaaaccgcgcctgaaaatccttaatatagcggccacgactctcatcatccaccataaatatatcaggcggaaaacgccaagcattatcccgcaacgccttcttagcgaccgactccgccgcacccgaatagtgggcataatccctatcggcatgccactccatcccaatgatgctggaacgataaggcgcaggccacatcagcatacgccacaacaggcggatatcatcctcacacgtgatagtcacccgcgaagaacgccaaggacccacaccatgaacccgacgcacaggcccagaaaaaatctggccaccaccataatcaacaaccagccgtgcacccggcttcgtcaacccgtcaagcctggaatgatcaccagacaccaccaactccagcgtcgacaaaccattccacttcaacgacaacttcaatgattcaaaaaaattgataggcgccacacggcgataatccggcgtaaacaatgttatctgcggaacaagaccagccatcaactattcaccaagccctcaaaaacctgtactgcaccgacacaacaacggcacccaaaccaaccatctcaatattcacactcttagaaccgccaggcggtataggcgcaaactcccactctgtcaaacgatccatcacatcctcaaacccatccaacaacgcagactgctgccgaggatccgtatcaatagtaatccaatcatactcctccaccggataatccgaagacacacgcaaaccatcaatctgcacagaccacgactccaaaggcccctcaacacgaatcacaggccacgcaggcacatcacccctgttagacagattatcccagccagaaccaacaccaggcgtcaacacaacaggaaacgccgtgccatccttgccgaccgggccgccacccagccaatcctgcaacttcgcattactaaaacgaaacctctgctcatccccataccaaaacgggtcataagccgtcaaatgcaacagataacgcgcataacccctgttcaccggatccaccgtaaacgtgtcatcagccgaatcaaaccgacacttcaacacacgctcaacaccggcaggagtcttcaccgacaactccccctcctccccaggaggaaaagcagaccacaacgcgtcataggctttcaaaaaaccgtcacgaaacccgccatccggatccgggtcaacacccgacaccaacaccggcaaagtcacctcgcgaggcttcacattaaacccgtgccactccgagccgtgcaccccaacatgagtttgagaaaaatgctccacctcaggaacacccaaaccgcgcaacgaatcattcaacaacatgacaggagacgcacccgtataatccgtcaaatgaagcacacgctcgtcgccaaacagcggatccataaaccaggtcacagtcaaaccagaacgatcagacgggtcaggaataaacatgcacaacacccccaatcacacgtaagccaacgcattcaaagcgtcacgctgctgccgctcaatccgcttcgcaaactcgttaggatcaccatacgtgggtccgttaacattcaccacaacactcttatcattcgcacgctgatacctgccatacggggtaaacgagcccaccgacgatcgcacaccaaaccgggcatcaaccgcatcaggcagacgtcccgccatatcagacatagcatccaacgccaaaccagcattaccggtgatcccctcagccaaaccggcaaccacctggcggccaacctggtcacgaaacaccctcgacggggaatgaatacccaacaccgacttcgccgcattcgcaacctgagaacccatattacgcaccgtatccaacaggccactcatagcattccggataccattacccaaaccagacaccacatcacggccagcagacaccaacaaggaccccatattaccgagagcacgccgaatattgccaggcaaattccggaaaaaacccagcacaccatgcacgccgttagacaccgccgagcccatagcatgcatagcagaagaagccgcactccgggcaccattaaacccgcgcacagcaccactacgaaccctagacgccatcgacccgaaaaacccaccaacagcagacgccaccgaagacacaacactccggatagcattcatcgcagaagaaacagcgccacgggccgcgttaaaaccagacctcacatgagaagcaacagaagaacccagccgggcaaaaaaccccacaaccgcgttcacaccgccagaaatgatcgacttgaaaccgttaataaacgcagacgtaaacgctctaatatgattccagccattcaagatggccgtgcccatagacctcacgccagacactaaatgattcacaacccatgagatgacacgggtgacagccccaataatccgggctgcagcagacacaatagcgccaagaatacgtgcaacaaacccgatcacagctgtcacaatcggcatcacaaccggaataatacgagccaccacctgcaacacaaccgaaacaacctgcaccaccacacgcataatcgacatgatgactggtatcagcgaccggatcaggccgataatcggcggcagaacagacatgacagcacccaaaatctgttgaatcacaggcatcaaaacaggcaccagttgcatcacaacaccaacaacctgccgtatcacagccacaacagcctgaatcaccggcatcaacgcgggcagcaacatggccgcaacctgtgtcaccgcaccaataatctgggtgatcacaggaaccagccgggcaaccagcatactaatcaaaggcaccagctgggcagccaaactggcaaccaaaccgataatctggccgaacactggcgccaactgtgccacaatcccagcaaccaaaccaaacagtggctgaatagctgccatgatctgccccagggcttgaccaaccacaccaacaagctgcataacagcggcacggaactgggcgttcgtagcaaacattgccgcaaacaagccgatcacaatcccgacagggccacctagggcgcgaaacacgccgccaagcccgccagcggcacccttcaaagcaccaaacgacggcagtagattcttcaacgacaccgccagcggggcaaaccctgcaacaagcttccccacaccggcagccacaataccgaacactgcggtgccgccagcaaacatggcacccaaattaactttagggacaggcaaatgcattctcgcaaaaatgcccttcaactgctccaccttggcgcgcatctgtgcattcattcgagtgatcatgcccggcatccggttaatccacgccaaaatagacggcatcatacgctgaataccagcatcgacggcagcaaacatcggcttcacagaatccgtgatagacttaataaccggattcaacgcaacaaaaatctgccgcaacccgttaagaaacggcgccatagccgtagcaccaagataacccagggcgcccttaacattcttcatagcgccctcaaacgtcttaccagacgcctgcgcagcaccacccatgccaagcttcatcgcagccgcaaacgtggcaaaatcaatctgccccttcgacaccatctgcgacacctcagccgacgttttacccgtctgcctggcaagcaaagacaggacaggaacaccagccatcgtaagctgcaacatgtcatcgccctgcaacttaccgcgagccatcacagacgtaaaaatagcgcccgtatcctgaaacgacttacccgaaatataagacacatcggcgacagtcttcaacacatccgtcatctgcccgccagacttcacacccgaagcagacaacgccgcagccgtagacgccgcatcccccaacgcatacgacgtaccagtcacagcctcaatagccgaattcataatcgaagacgtgtcagacgacgtatgacccaaaccagtcaacttagcctgagcctcatcaatagccatcgccctagcaataccgccaccaatagtcacatcataaatcgacttgaggcccttcttagcaacactaatagcgcccatcatcgccgcgccaccaagcgccagcttcatgcccttagcaaacaggctacccgaacgctgaccctcagcaggcataacacccgacaactgtttaccaacatccgccttcaaaccgggcatcttcgtatacaacgacacatatgcggaagcaatctcaccagacatgcactattcaccccataatattaatctcgcgagacaccccgccaccggcacgaacacgcgccaaaatatcgtccacctgcccagacgtaaaccgggccctacgctcatccgtcggcctcgccacaggctccggctgcccctcactattagcagacctgtaatgatccagcatgtccagcacagcccactcgcaccactcaaacgggcgctgccaaccattcaggtgggccgccaactggctagacgtatcggtacacaacacgccagccagccggacagcctcaccccaacacatctgcgggccaccaacactataaacagaaacaccaaatttagtgcggaaatcgtattcgatggccccacgataatcatcaatcaggccgtggagccaaactattcccccagcgaggcacccttaccgtcaggcttatattccatccactggcggaaaatctcggccacacgaaccataggaagcccctccagtgcctccacagcatcctctggggcggcagcctccaacatagaaaacatcacctcaacctgggcgaaatccgcagactcccccgactgggcaatcttagcggcacgacggaaaacgcgggcaggaacagcctgagccgtctcctccgcatccgtcaacacccagctacggtcaccaatctttaacgtgtaacctgtgtcactcatatatcaacaatccctcaaactatgtgtatcagttctcagacggcggattcggatccggctgaggcttcggagaaggaggagtatcagcttttaaagccgtcatccacccccgacccgacaccgcattaccagtcttattaatctgggcaggatacgccttcaacgtcacaccatacccgtacacttcgccattcttgcccttgatctcgtcacgatcgataagctcaacctcagggaaatagtagcgaataacctgatcaccatcaacaatatccatcaacagggcgtgaacacccgtcgtggcaccaggagaaatatcgaacgaacccgaatcggatccggcagtaaccttcgactgccaaaacagttcgataacctccttcttagactcaatcagctggaaagaaatctcgatagacgactccgtagccacagtgcgaacaacatccgcattctgccaagccttcaaatcatccgttttacgctcaggcttaatcttaaacccgtcatcagacagataccctaaagctgtaagcccggaaggaaccgcctccacacccttaatagtatcacccgcgtgcgcgtcaccaatataaacgtcgccagtaacagctgaacgaacattagacgctttacgtgttgcaaccatcacaacccccattaaatataaaacaattacattaaaacaaaaacaataagcttattcagactcgacaggcctacatatcagctcaaaaagcgaatacacatcaaaacgtgcaccatcaaccagtaaatcagggccagtagaccgtttacaatacaccaccgggtcaccatcaacaccatcagccagcacagcctcaacccgcctagctaacgacatagcacgatcaggcgtatccgaaaacacattcacccgcaaaaacacctgctcacgcacatgcaactgcgggccaccatccaacgccaaccaaatcaaatcaccgctgaaatcatcaggcaccgtccccgtacacggtatatcggacagccagccatcatccttgagcacgcgtttagcccacacacgcggatcaccgtaaacgatcacgacgccgccccaatcgaacgagccaacgtgccatgcttcgcctcaatacgcttcccacccttataggtggtgccaatcctcgccacagcctcaacacggtgaacctgcacctccgacgacaaaccattacggtattgggccctatcaaacgcattaccgcccacattcgccgaggccgcacgcttgacacgctcgccacgctcagccaacatagcctgcaccccagaagacttcaacacctcacgaatacccggcaagttcagcttcacattcacatcctgagccactacccatcagcccttcttacgcttcacattaacctgcgcaccagcatcccagccagacatcggatgatgccacaccataggagacccgtcagcctcccacacaacaccccgaatacgccacctacaacgataatcagcgcccacaacaggctgcttgaacagcatcgaccaatgctcataatcagagtcacgccccgcggcctcatcctcctgcgaaacggaagcatagatggccacgttatggtacacggtttctacaggatgcccccaatcctcaaccttgtcaccaagatcatcgacacgaacagtcggctgaagcatcacaactgtttcaccgtaaggaaaactggtcatatcatatctcccacaaagggccagcgtagccgttaatattcgacccgcacgagcaaccctcaccccacaccgtggaacacacctcagaatgattcacactactcctcatggtcggtgtaatagtgaacgctttaccagccccaccatcaccctcacacagcttcttcaacgcggcaatctcagaaggccacaacaaattagtgggagtattagaccgtgtagtctgagcgaaaggacccgcagactcatactgcacctggccagaaaccccggtatcattccagcgcaacaaagccctgcgcagaatagccttagccgcatccttgtatttgaaatccggtttagctatacagggggcgacactgacagccacagcctccacatcagcaatcatcgcctcaagcttctctctaggaatatcggcgaaaggctcaaaatctttcggatcaagaatgatacccatcaacaccaccccctgcacattgacacatcaccgcaacaaatgaatcagttctcggccggcggattaggcttcggggcagccttctccttcacaacagcaaacgaatcaagcgactcgatagccacatacagcacagcctcggcacgaaccataacctcattatggcccttcaggtcacgcccagtctgatccggatcgccatactcgataagctcgatcgggaagttacgctggaaaccccaatgaacacgcgaaaaatcaccaacaatagccttcacaccagaagcaggcgacatctccggggcacccgaaacagtcgaagaagcaccaacattcagcccacgccaattatccaaaccagcaaacccggcggcaggatacataggctggccggcaagcggagaccccttcggatacacctcagtagacagagcaaacgagaacgccggatccaaagcaacaccgtta

SEQ ID NO: 10 - DNA, 29698 bp, Propionibacterium acnes bacteriophage
acacacgccaccaacgacgcgtctccccacaccaatcacgaccatcaggaagctcaggctgcacaacactcaccaccaacacaaaaagtcgacaaacatacaaaaccacaaaagggaggtatttcactaagccgtacgtggtcttgcacgggtgtgcagggggtgtccccggtgggggttggcgggtttttcaccatggaatcaatgtttttgtggtttgttgttggaatgtgatgtttggttcgctgcgattgcctttgcttctgttgcatgttctgcagatgatttgcccgttgtcgagggtgttgagtcctcccctgctgacgggtgtgatgtggtcggcttcggggctggttggcaggtcgtgtgtgccccaggctatctgggctccgcagagtgggcattcggtttggccttgctgtcgggcttgggtgatgagtcttgcccgccagcgccggtgggcttggctggctgtacggttggtgcgtgccatgatgtgtctgttcctcgcctagccctgtacgggtcttatttgcccctctaccggcctgggaaccgttggggtatgaataccttgcccttgccctgctgatcgatcctaggggcctttttgttcgtttgagggggtgttctgttttgtgccggggtggttgttttctccactaccccctggcatgtgaaaaatatcacatcaccccccagcggtgtcaaaagaagaaagacacgaaagaaaaaagggggtggatgggtgttcgcgtttcacagcttagcgctgggcgcctagcgctaaaggacacaggctaagcgggaacaccttaaggttttaaagtcttctacatataatatacactttaagtctcacccggtgttaagggtgtgagcgtgacacgccgtacgccttcagccgaacacgccaagcctgaaagggacacaggtagagtaagtgtggtgagtgtgcaaccgggagcgtgcgaccggtggtacacgagacacacggtgaaagcccatcagcgttgacggccaaaggttcctcttctcccctgatgaagaaaagaagagaagagagaaagaaccaaagagagaagagaagtaaagaagttaaccccttatctcttctaaaacttttataacctataagctttaagacttataggttataatattaaagtttaagactgatggttaactttaagtacttaaggtctttaagtcttaatagttattttaagttttaaagtcttaaacactgatgtgaagtttatatccttaagtactaagcctttaaggttttatacttaacttaggtgttaagatctttatactgatgctgagccttgaagggctcagtgctaagtgtgtaagcctttaaggttattaattaactttaagtgctaagctcttaaagtttacttaaagtgtttaaagctttaagactgatgccgagcccttgaggggctcggtgctaagctatcagcaccttagcgctaagcccttaggtctttaagtctttggtagactgatggatgtaagggtgaaagccgcgtcagcggatttcggccttgcgtccagctggctacctgtccagcctatcataccccacctgggatgagtcaaactggtggatttggctctataggctggtttgaggggtgtaaacgggtgtttttggtggtaaaggtccaaaaattaaacctaaacttttccttaaattttcttagagtcttgtaacctttgagggtagttaagactgaaacccctagtcagaacgggtttcactcccgaacagctgtcacacttcactcttgtgtcctttccgaacacgctaggcccatcagtgctgagggtgttccctcaggctttcgagtactcgtcgctaaggctcctcgtactctcaagccttccctgatggcgtgtacttgctaaggctgtgcctgttcgggctgatgccgagcccttgaggggctcggtgctaactgctaagaccatcagtgctaagcgctaagaccttaaggcttgaaggctgatgctcccctctttcttttaccgtgtccttcttcccccttagtatcccacactgtccacatagttgaggcttagctaaccaggataggggttgatggtctatgccgagatggttgatcgcgtatcaggctgtgggggacgtctagaatcgatcagaattgcttgggggtataaatacctagcccccaccctgtaaggcgctcctaggcgccgtgtgaaggctttaaatggtatttctgggctacacccttcacgtcagattggcagagtggtcttgagggtgcatactaagccaggagtatgtgatacatctcacacacctagatgatagatcttatgtctcatctcggcgccttgactcgctagaccatctgccacacccgccataacccagacacacccctaaggcgccctagaagggccctagaatcgatctgcagggtcaaccctatataatcctaccccggacatatttcaggcgctgagagaggcaataaaggcttcagtgacatctgtcacacccgacactccagcatgaaacgctcaatccgaatgagcgccaccttgactatggatcacaacctacacactctagaaaccacaacaacccccacaaccgccgaaaggagcacaccctcatggatggcacactcatcacaccatcattcaccagcctctatgggcagacagaaatcaacccactccaccccgcacacctggcaggatgtgacataggcaacacccacacgtctatcatctgccgcctgtaccgtgccaaagtcgaagaagccatacgactcatccgacccatgtggactgtcaccctcgacggtgccatatacggaccccatgactggcagccactcaccgcggatgaagctgaggacctccacgacatgatcgacacgatcgacgtcgacgccatcatcgccgaagccacacgataaaactatcaacccaccacacgagaaaaggaatcatgatgcagaagatcgccaaccacttcacccagctctacaccccagccagctacgactgccccacacccttcgacctgacacgcctcgaaaacctcccctgcgaccacatggattttgagggcctcgccgaagcctaccggcagagcgtggaagccgaactccacaagctacgccccaacacattcatcgcctccgatggcaccgtgttcagccatgacgagtggaagccgctcactggcggtgaagccacacaactctactggaatgtgagccgcatcaacgtaggccacctcctcaccctgtacagccgatagccccccaccccacaagaatcactcgtacacaatgagcctagaatcgcctagaaaatacctgacctatataatcatacccccaggggctgaaagtcgctctaacccaccgagtcacagcttaaaacacgaaagaaggaccaatcatgcaatggacatgccacaagtgcgatagcacaatcaccggataccgaccagaacactgcacagtctgtcacgagacattcactagtactcgctctagcgacatgcaccgcacaggcgatcatggagtcaaggaaggccccagtcgtcgcaggtttctcaccgtggacgagatgaaggctaagggtatgaagcgtaatcgtctcggctactggactacaggacgtgacctgtcatacctcaaggacaaaacacctagccacacaggaaacgctcacaatcgttgagcgcagccttgacacgaggtccagtcactggaagtattgatcatgtcagcaacgaacaacaccccggaaaggggacaacagtcatgaacaagaaaaaaggctacaccatcgccggcgccacagccgccatcattgccgcagcctcattcatgccagccccagacgacaatccgccactcgcctcccagccagccccacaggccaccacagccaacaccgaatggacccccaagactacccaacagcgcaaagccgagaaagcggcacggcaggcagccgcagaacagtcactgcgagccgagcaggccaaagcccacaagcaggcccaagcaaggggtgaagaaacctcacaaggtctcaccatgatcacggcagcacacgcctgcgaccgcaaagccgaacagaaagccgcagcgcaaggcgtcaaatggaacggcaacccagacatcgacctccaactccacaaaattattggtaaagacaccttcagcatcgtctacggcgccaccgtccgccagccgggagcatccaaactacccgtcaccgtccactgcctcgtcaccggaacagaagaccacccgcacgtcaccgacctcaacatcaacccgcaacagtaacccgccaaggagcatccccgctatgcctctcctctcccactacgctgtcaccaccggactcgccgacacggcacacatcattcaccacaccggcggcacactacgcacagccaccgacatcgcctcccgcatcaacaccctcaacccagacattgatctcgaccaccaaatcaaccaactgttatctatcgaaacagacctgtacaacatttataaaaccatcaacaccattcttcaggagcaagcatgaacacacccaacaacattgagctacacagctacgaaacgttcttcaccagcctcgcctggatccaaggcgccatcatcacatggatgtacgcaaccggcaccccacacaaggcagccctcgccatcatcgccgcatgcgccctcaccaccctcctgggtgcctccacactcacctaccagcccaaaaacaacaaatgatcacaacacccatacttattgctgaaaccctcgccatcattattctcgccgtagcactcgcccacaaccccaaccagtaacccacccctaaggagcacacccccatggataagccaacccgcatgtacaccgaccccaacagcggtgccaaaaaagaattgaaactttgcaggctatccctcatcgaccccgcagccttgcacgatctaggctccgtggcaggatacggtgccaccaaatacggcgacaacaactggaccggcggctatccgtggagccacagtgtcgacgccctctaccggcacctactatcatggcagcaaggcaacaacctcgatgatgaatccgggctaccccatctagcccatgcagcctggcactgcctagcactcctcgcataccagcaacaccacgccggccaagacacccgcaacccatggaacacccacaaaggcgacaagtaatgcctctagcacaaaaaccatccaccatcgaccatccaggccacatctcctacagttcactcacccagtgggccgaatgcggagaaaaatggcgcctatcccacggctaccacgcccaacaccacacctggtacgccaccatcgccggaagcgccatacaccacatcaccgaacaatacgacctacacctgtacaatcccgccgaataccctgcactgccagacaaactctcatccttcacaaacattttcgacacccaagtcgccctcgccgaatcagaaggcaccgaaatcaaaccctccggcagaatatgcaaaaacatgtgcgagtcgggcgggccacacaaaaaagactacaattggtggatgatatacggccccacctttgtggaccggtggaaaacatggaggcgcaaccacccagaatacatcaccgctgttattgacggccagccaggcatcgaatacccggtagaaaccaccctccaggatggcaccactattgttggctacatcgaccgtatcttcaccgacaccgacactggcgaaaccttcattttggacctcaaaacaggacgcctacccgccgacagcatgcagctgcacacctaccggtacatgctcaaccaacacggcatccatgtcacgaaaggcatgttttggacgccagccaccagccgcaacgacgacaagtccccgacacaaggcacatccaccgaactctatgaccttgacaacaacacctaccggcatgtatcatccatgtacagtcaagcaatgaaaggaatcagtcaaggcatcttcgtaccccatgtcacagcactctgtaaaggctgccccgtcaaggacgcctgctgggctgtcaacgggaaagacgcctacaggtaccctatagaaacaaccatcacagccccaacaaaagaaggcaaggaacaccagtgaccgacaacacagacgacgaccgattcaccgtcacactcaaatacggaggcgactacgccgccccatggaccgtcatccgcggagacaccgccgaccaggtaaagaagactatcatcgacctgctaggcggactcaaaaacagctccgcggcaaggaactgggacctggcaacactgatcgccacagcatccataatcctccaagatcgctacaatcaggccgccaaagactacgtagacaacatcgcctcagaaggaaacaacaccatcatcgacaaaatcaacaatgcaacaagcaaagcacagctagccgacctcctcaaacagtacaagaagaccatcactagtaacagtgacgtgtccgaggcgttccgcactaaacgaaacagcctcacccgataaaaaccaacaaacaaaccaacacaaacagtcaaggaaacaacaatgggactcgcaaactaccgaaacaacagcaacagcaccttcttcaacccctcccgaaaccaggacgccaccgccatcgccttcaaagtccgcgacgtagaacacaacaccgaaggctacggtggacaggtcgcagaccgcatctacgctgatgtcacaatcttccacaccctagacgatctcaacaacggcaccccagaaaccatccccaacgctattattgagaaagcacgcggcaacaacgaccgcccacactccatgatccgcgacctcgaagcctaccttggcgaggagcaggccttcaaactcgccaccgtacgcaccaaaaacggcttcaacgcggtcgtgctcaaaccccttgatgacgccatctacgataaggttgccgaatacgtagacaaacgcgataacggccagctagacgacaccacagcccccgccgatgctgacatcgacatcgactccatctgaccaccaacacaacatccaaccgatagacagatagattaaggctccgatgctctctctccaacgatccttcgagagagcctcccaaacagccgccgagctgccccgcataccacaactagaacccctctaccgcaacctggacatgcacatccacaaaggggacctcgtcatgatcgcggggcggtccggcagccaaaaatcagggctagccatgttcatcacagcaatgctcaaccagcccgccctctacatatcaggggacatgacaccctgggaggcctccacacgaatcatctcactcaacacccaacacaccaccgcccaaatacaacaaaacatcgacgactacgggccagaatactatcgagacagcatccaccacggccaacacatcacattctcattccagtcacccatcacctggaccgacatcaccatggagctacaagcctacatggaaatgtggaacaccttcccgccactcattgttatcgacaacctgatggacattcaagactgcgagagtgactaccaggcccagcaagaagccatgcaatggatcacagcattaggtagagatactggctccaccattattgtcacccaccacgcaaccgacaaaaccggaaccgacatcgaacaccccccagctaggcgggaaatcaaaaacggcctctccgaaaaaccacaactcatcctcggagtctcattgtatggtggcgaagacaacggcaacgggctcaccatccccgccgaggcacgcatcgccgtactcaaacagcgcacaggcaaatccagcccagacggaacccgatacgaaagactcagagcctaccccgaatacacattcttcgggccactcgccgaaaaacagccatggaacatgaccgaacaccacaaaggactatcatgtcaacacaacagtcacgcaaccgccgggccggcgcagaatgggaaacacgactcctccaccagctacgcgacaccggctatgatatagagcgcctccacctcaacggccgcgaagacgaaggcgacctcatcctcacaaccggccacaaaacctacattatcgaggcgaaagccggacagccacacctagcccaattcgtgaaacaagccagccgggaggcacgcaactacgaaacacaccgaaacaaacaaaacaattccaccatcggactcgtagtgatgaaacagcgcaacaaaccctggagcgaagcctatgtggtatcaaccctcaacgagctcctcccacacctctgacacctgccgcctcctcgacacctaccagatacgctacaatccttccaggaacgagcaacacatcctctgcccgttccacgacgaccaccagccctccatgagcatcaacctcgacaagggcgtctggtactgccacacatgcggtatcggaggcggactcgccaaactgaaacaacaattagagaaagaaaacccgaatgtacgactcactacaaccctacaacattgcggaacgccgccgaatccagaaagcctcggccctctacgaaacccacctcgaaaacatactcgacctgctctcagcaagaggcatcagcgaagaaacagcccgctaccaccaccttggatacatcgacaatgaccccatcccaggccacgaagactacaaccagtgcatcaccatcccctacatgtaccccgtctggggcggcccagccgaaatacgaaaaatgcgtttccgctgctcactccagcatgattgcaaaacccacaaccaccccaaatatctaaccccggcaggagacacaggctccatctacaacatggccgccatggccaacccggcagccgaaatgcacatttgcgaaggcgaattcgactccatgatcctcgaacaatgcggatggtcggccgtagccctacccggggccacctcgtggcaaactttctggaccaaattttttgaaggctacgaccgcatctacatctggtccgaccccgacaaagcaggagaccagatggcccaaaccatccaggcggcactcccccaagccatacacgtacccctcactgtcggggatgtcacagacacctatctgcaggccggaaaaacagggttgacacaagcactagacacagtgctacaataaaaccacacaagcaaccccaacaaagaaaggcataaaaagcatcatggaccccctcgacacatgccccatccccggccgccgcgacaccagcaaagccgcccggaggcgtatccgcctcgccatctgtgcagaaaaatgggccgacggcgtggacccactccacatcatgcacacctggggcaccacctatgatgggatgcgatccatgatccgcgccaacaccgacattaaactacccgacgacatggccaaacggttacacaaaatctgccgggaagcctaccccaaaaaccagcccaacaggcaccgaagcggatgggaccaatacgaaaaagactactacacggaggaaatactcttcctcaactccttcaacgtgccagccatcgacatgctcaaacgactcgacgtctcgtggacaatgtggaaacaaatcatcaccgaaaacaatctcacccggctccagcaagaaaccgacaacgcctgccaatgggcaaacctgcgaaaacagcaccccgacaaaacggatcaggaaatcacccagatgatgtacagtaaccaagtaacgttcagcaaggtgatgaaaaccatacccgcataaacacccacgacacccgcacagtatgtgcacactctttcacacataggagacatgatggtcaccaaaacccaacacgtgaccgacacaaacagggacaacaacgaccagctgccggagcatctacaagacgtcatgtgcggtaaaacactcaaccacacagacggaaccgtctcatggtgcacacgcaaaccaggacacgacggcgactgccgcacaggatggcagcccaccacacaacccctaggacatcatggcaaccaaaactgaaaccctcatccaacgctacggtgataaggctgccgacgtactcgccgacaggtccatacccgccacacagctagcccaaatgctcactgaagccggataccccatctccgccaccgttatcaaagactaccgccgcaaacaagccaacaccaccccgcaagaggaggaaaaccagtgatagacaacatagaccggctcctcacacaactagccaaccacgacaacgccatcgacaccatcgacgacaatctagccaacggcaccgtgcgccgcacacgcatctccgaatggaccttaccgaacggagaaaccggccgatccatacaaaaaataatcgaccaccaacccgcaaccgacccctaccccgtagacgaactcgtcaacaaactagccgaatggcagccaccaaaacccgaacaagacacccgcaccgactacagcactgcggccttcgtcatcggggcaggagacttccaaatcggcaaaggcatccccggcggagaaacatcacacttcgccgacaactatttacactccctcatagtcgcaaaacactactggcagcaagcaggcaaacccgaacgagtccacatagccttcctcggcgacatgatcgaaggatacgtgtcacaaggaggcaacaacgcctggcgcacccaaacacccctgacggaacaaatcaggctcacccgcatggccatgatgcaactcgtccacatgttcgaccactgcgccaacgtcaccatcacatccatccccggcaaccacggagaagccgtacgcttcggaaaaggagtcaccacctacgacgactccttcgatgtggactgctgccgcgccatcgcagaagcctaccagctcaacaaccaataccccaacctacacttccacttccccagccgagacgaaatgaccaccaccgttgatgtggcaggcacacaaatcctgcacgcccacggacaccaatggcgcaccggcaaacactacgaatggtggcgcggccaagaattccacaacggaaccacatcccacatcctgatggccgggcaccggcaccacctagaaatctccgagcaaggcacacgcaccttcatccaatgcccatccatggaaggagaatccacatggtatcggcaccgcacaggcaccaccggaaaccccggactcgtgtgctacactatcaacaacaaaacaccaaacaactaccagatagccaggtaatagtgccatgagcagacgaccaacaaaagcagacctagccaccaccgcatcgtgggtgtgggccacagaccatcatctacgcacactcaaccgggcatgcaccaaaacagccgcacactaccccgcaatcagcgcagacgacctctaccaagactccctactatatattgcagtgcgggaacaataccacaacctagacaacaaacactacaccaaaatgtgctacagggtagccaaacggctagccaacaaaaccatacaacacctagaccagccgaaacctttacccgatatcattcatctagccgacaaccaaaccagcatttaaaaggagaacacacaccatggtcacaaccatcctcgacgacggaacccaaaccaccaggatacaaacagtaggcgccaccaccaccgccatcatcaccaacacagaaacaccagaaaccatcaccgccaaatacaccatcagtaaagacggcacagccacctacagcatcagcggaaacacctatttgggagaccatcaacacattattaaactcatgtacgactactgccactgcgtcggacgattcgacaccaccaacaccagcaacccagacaatctcgacaacctattcaggggatgaccagtgaaccgaacctacaccaccgccgacatcatccaagccgcccaatggatctggaacggcggaccatggaaaccatcagtcgagccaggcatgccaccaccaccaaccgcgccacaacaccacggcaacaacatcgttaccatgatcgatttgcagctagccatcgacgactacaccctcacctgccagccatccaaacagcgaaaacatttggcacgcctggccgcattccgggaagtctacggatacgaccaaacatatgccacagccgcccaacgattgggtgtcacccggcaaaccgtgaaacagtgggcagaccaaacactcatcaccctaacaggctacgcaaacagtagatactatccagacgatagcgacgacagcacagggacgaaataaaaccatgaacaacacaaccaatatcacctacactgccctcaaaacagcggtacaccgaatcatccaacaacagcccaccaacatgaaccagctgcaaaacattgttgacagtgtcgaaaaccagtaccgtgtacacatctcactcgacaacgtgaaccttaccgtcaaagaagtcagcctcgacgatctcgctatcgaccaggacacgctagacgagtgcagcgaaatcttgtgggactgcgacagtgcaggatacccaaacaacagcaacacccgtggcattccagacgacacacgggcaagccaggaagccatagattggctcgccggaatcgcataccaaaccaaactactgcaagcggcggccgacgagatcatgcagtctatcatctgccaccgcgacaaccacaaaaatgttatcggccagaacgttctagaccaggccaacgatactatctccgcctgcctccacctggaccagctgatcgaagacacactagacgacaacctgtaaaactcctgtagacacaaaaatagtgccccagcggcaaccaccacacaatcgtggcagcaccgctggggcacacatctatattcacttatgcaacagtagactctaccgtcccaacctccgactcggctgcacgccgaggctcatagcctacaccaagatccgcatcctctgcaggctcgatcatgccaggatccgacacatccaccaagtgcggctcaaccaagcccccatcatccggtggaaccaaacccgcatccacaggcgtggttttaggtttgccggccacaaacgctgggctaccaaacgatgtagccaccgacaggactgcagccaccgttgctgttatcagggccgactcccacggcaaaccgcgaaacgactccgccgtataggtgacacccgccgtcacccccaacaccgcaacaaacgtttgaacaaaagtcttagccgcccgctccagtaaacctaaccaaaactgtttacccatcacacatcaccatcactttttcaaatcgttgacagcagactcgagcctgtcaatacggctacgacactccagcacgtaataccagacactccacaaagcgtcttttgtgcgccacagcttccccgtcaccggattcttcacccacgacagggcatcaacacgtttactcaaatcaccattctgaacctgaaccacaccaacatcatggtgcagcttattcaccgaaccactaagctgagcagacaattgtttaatctgatcatgcaaggctttcacatcagccaccgttaactcctcactacttgaaccgccgccgtggccattcaccacagccataaacttgtcccacggaaaccacggccccggatcgtcatgatccgactgatgccacgcatccgtcacatcagtgtgcccgcagatgccccgcctacccgctttcagatcggatacgctaagcttccttttcggaacaccatgcttgtcacacaactgccgacacaggatggcggcacgctccacagcgggccacaccctcgggtcaagccactgctccctcgtgtaagcatgccctggcacacggaacgaggcgtgcgaacccccatccgcgcaaatctctatacccaaactatgcggattcggcggggcatgccacccaatcgtagactccgacaagcactgcaccgtctccccaatatcacacacataatgggcagaaccacccgacgatggggaagcaaaatagtttgccgtggacaccgcccgccccttacgcgaggcagacggaaaccccacatccgggcatgtcgcatgaatcaccaccctattcaccggactattcgagccggccgagtgatgcgccgctggaatgtatctcaccacacaccaccaccaaacacaaccaacatcagtaacacccttcccttttcttttttacttgcgggatgacacggtaaccacaggtgatggtttcacactctcgcaggccaccgaacccgctatggtagaggccgtaccgtcactatatttcacaaccaggcggcccccggaacagtacaccgatatcaccgagcgcccatccttaccatctttaccatcggatccgttcgcaccggcagaaccctgcggcccctgaggccccacagggccacgctcaccctgtgcaccggctacaccagggggaccggcagggccacggccaccatcagccccatcagcgccatccctacctggcacgccatcccggccatcagccccgttcacaccggcaacaccatcatggccatccgaaccgttagcgccaggcaacccgtcaggacccttcacaccattcaaacccggggaaccctgcggaccaacagggccaaccagcccagccgaaccattaacaccatcccggccatcaacaccagcgggcccttgcgggccgcgctcaccggcaggacccggcacaccctgcacgctacgctcaacacgctgagcatccacacataagccagactggtgaagacgcaccgactcctgcccacccgaagcacacacccgcttcacacggctggccaaccctttagcggctgtaccattagactgggccctcgcctgctccgaatccctttgcgaagccacagacccgtaccgtaaagcacccgcagcaaccaccgccaacagcacaagcgacaggaacaacagtatcagggaagccttctcaaacgagcggcgctgccttttttcttcctccaactccctcacaattcaccccccaccaccatcaacagtatccttcaaaaactcgggcaaatcaggcatcttcaccggctcaacattctccggcagattcgcgttatagcggtgaacaatatggcgaatattccacgtgtactcttccatcgcatcaacctgcgcagacaactgcctaagcctcttcttcgacctgtacgtaacagcctgaatcgaaccaaggacagtagcgatagcggtacaaagagaggctacgagtgtgggtgtaaaccatgacactatagccccctacaactaaaaccaccacaacacgtcacataccagcaagccgcgcattacacgccgacagcaatccagttagccaccgcaggcaccccattcggcttagacccgtcattcgtgataaacgccaactgaaaatccttggcagtaacattgtaggctttcacatcaatctgctgcgtgcccccagccgccgtagccatagacgccaccaccacaggcggactactgaactggcgctcaaacgggatcgtgtaagcatacacagcagacccgccaaactggatctgcttagtgcccgtctcaatcctgggggacaacagcatccactcgttagcatggttagcccacacagcccccgaaggcaccatcacccggtcaccctccacaggggtaggatcacacgcagcagactcgccaaacgccaccctcgccgctatagcacgcctatccaactgctgctgcaacccgttagacgacaacaccaaagtagccagtagctgctgatggtacacgccaggctcagcccttaacacgtcacgggcacgctccgcacgccccccaggaacaatctccaacttggccgtattctgctcccaatcccgagacaggacaacatagtcgtatcgggtctcgccagggccaggcagctgccctgtcaccgtctcaacactattcgacgtgcacatcaccccgtgagcccaagcctgccccggcaaaacactacacaacaccgtggcaccctgaacagtagtgcccacacgaaaatcgtccgggcccttcacggacggcatattacccatcagaccagacatttgagcccaatcatactcggtcaacacaccatcaaaacccttgcacacaatacccacaacaaacccccaattcttttctaaaatttttgcaaatcccgcacacccgcagccaaatcagccacacggcgagccaacagggccgacggattatcctcataatcccccgcaataggagtcaccttcgtccacccgtcaccaggcgatacacactccacatcaatctgccgaacaatctccgcaataggccccgagcccacatccacatagatcaaatcacccggcatcagattgcctggcccaaaccgcaacacatccgactcagccaactcgatcttaaaccccgacgtggcccccgactcggacaacacccgctccgcctcatcaataagatgcacatgctcagaatccgtgttacgggcatccttaaacacctcgacacgatcaaaccactcatcctcggccaacgcgtcaaaatcctcacaaaacagccgatccttgccctcgccgcggccacccacaaccaccgccgtagccttcggggcgtcacgcacatactcccacgacacaatagacccagactcggcagtcaacacatggtcacgcgtcacagcaggcacacaatcaaacagtaaaccccgctgatcctgcttcacattctcaaactggttcaccgtgacagtcatccgagcccacgacaacaccggcaacaacttatcggcaaacacgtgaaaccgcgcctgaaaatccttaatatagcggccacgactcttatcatccaccataaatatatcaggcggaaaacgccaagtattatcccgcaacgccttcttagcgaccgactccgccgcacccgaatagtgggcataatccctattggcacgccactccatcccaatgatgctggaacgataaggcacaggccacaacagcatacgccacaacaggcggatatcatcctcacacgtgatagtcacccgcgaagaacgccaaggaccaacaccatgcacccgacgcacaggcccagaaaaaatctggccaccaccataatcaacaaccagccgtgcacccggcctagtcaatccttcaagcctggaatgatccccagacaccaccaactccaaagtggacaaaccattccacttcaacgacaacttcaacgactcaaaaaaattgataggcgccacacgacgataatccggcgtaaacaatgttatctgcggaacaagaccagccatcaaccattcaccaagccctcaaaaacctgtactgcaccgacacaacaatggcacccaaaccaaccatctcaatattcacactcttcgaaccgccaggcggaataggcgcaaactcccactctgtcaaacgatccatcacatcctcaaacccgttcaacaacgccgactgctggcgaggatccgtgtcaatagtgatccaatcatactcctcgacaggataatcagaagacacacgcaaaccatcaatctgcacagaccacgactccaaaggaccctcaacacgaatcacaggccacgcaggcacatcacccttattagacagattatcccaacccgaaccaacaccaggcgtcaacaccacaggaaacgccgtgccatccttgccgacagggccgccacccaaccaatcctgcaacttcgcgttactaaaacgaaacttttgctcatccccataccaaaacgggtcataggccgtcaaatgaatcacataacgcgcataacccctgttcaccggatccaccgtaaacgtgtcatcaaccgaatcaaaccggcattttagcacacgctcacgaccggcaggagtcttcacagacaactccccctcctccccgggaggaaaagcagaccacaacgcgtcataggctttcaaaaaaccgtcacgaaacccgccatcaggatccggatccacacccgacaccaacaccggcagcgtcacctcgcgaggcttcacattaaacccgcgccactccgagccgtgcaccccaacatgcgtttgagaaaaatgctccacctcaggaacacccaaaccgcgcaacgaatcattcaacaacatcaccggagacgaccccgtataatccgtcaaatgaagcacacgctccccaccaaacagcggatccatagaccaggtcacagtcaaaccagaacgatcagacgggtcaggaataaacatgcatacccctttactcacatataagccaacgcgttcaaagcgtcacgctgctgccgctcaatccgcttcgcaaactcggcaggatcaccatacgtcgggccattcacattcaccacaacactcttatcattctcacgccgataccggtcatacggggtaaacgagcccacagacgatcgcacaccaaaccgggcatcaacagcatccggaagctgcgaagcaacacccgacatcgcatccaacgccaaaccagcattaccagtaataccctcagccaaaccggcaacaacctgccggccaacctcgtcacgaaacaccctagacggggaatgaatacccagagcagacttcgcagcattagcaatctgggaacccatgttacgcaccgtatccaacaggccactcatagcattcttaataccgttacccaaaccggcaacaacattatggccagcagacaccaacagggaccccatgttacccagggcgcccctaatattgctgggcagattccggaaaaaacctatcacactatgcacaccactagacacagccgagcccatagcgtgcatagcagaagaagccgcacccctcgcagcgttaaacccggacgaggcagcaccacgaacccgagaagccatcgacccgaaaaatccgccaacagcggacgccaccgaagacacaacactccggatagcattcatcgcagaagaaacagcgccacgagccgcgttaaaaccagacctcacatgggaggcaaccgaagaacccagccgggcaaaaaaccccacaaccgcgttcacgccgccagaaatcaccgacttgaaaccattaataaacgcagacgtaaacgccctaatatgattccagccagcctgaaccaccgaacccatacgcgccaaaccagacacaaaatgggcaacaacccacgagatgacacgggcaacagcggcaataacacgggccacagccgacacgacagcaccaacaatacgggcaacaaacccgaccacggccgccaccatcggagccacaacagcaagaatacgggccaccacctgtatcacaaccgcaacaacctgaaccaccacacgcataacagacatgatgactggtatcaacgaccggatcaggccaataatcggtggcagcacagacatgacagcacccaaaatctgttgaatcaccggcatcaacaccggcaccagttgcatgatcacgccaacaacctgacgtatcacagccacaacagcctgcaacaccggcataagcgcaggcagcaacattgcagccacctgcgtcaccgcaccaataatctgcgtgatcacaggaaccagctgggcaaccagcatactaaccaaaggcataagctgcgcagctagcccggcaaccaaaccgataatctggccaaacactggcgccaaccgtgccaccaaaccagcaaccaaacccaacagcggctgcacagcggccatgatctggcccaacgcctggccaaccacagccacaagctgcatcaccgcggcacggaactgggcgttcgtggcaaacatggcagcaaacaagccgatcacaatcccgacagggccacccaaggcgcgaaacacgccgccaagcccgccagccgcacccctcaaagcaccaaacgacggcaacaaattcttcaacgacaccgccaacggggcaaaccccgcaacaagcttccccacaccggcagcaacaataccaaacactgcggtgccgccagcaaacatggcagccaaattcactttaggaacaggcaaatgcattctcgcaaaaatgcccttcaactgctccaccttggcgcgcatctgtgcattcattcgagtgatcatgcccggcatacggttaatccacgccaaaatagacggcatcatccgctgaatcccctgatccaccgacgcaaacaaaggcttcacagactccgtgatagacttaataaccggattcaacgcaacaaaaatctgcctcaggccgttaagaaacggcgccatagccgtagcacccaaataacccagggcgctcttaacattcttcatagcgccctcaaacgtcttaccagacgcctgcgcagcaccacccatgccaagcttcatcgcagccgcaaacgtgttaaaatcaatctgccccttcgacaccatctgcgacacctcagcagacgttttacccgtctgcctggcaagcaaagacagcacaggaacacccgccatcgtaagctgcaacatgtcatcgccctgcaacttaccgcgagccatcacagacgtaaaaatagcgcccgtatcctgaaacgacttaccagaaatataagacacatcggcgacagtcttcaacacatccgtcatctgcccgccagacttcacacccgaagcagacaacgccgcagccgtagacgccgcatcacccaacgcatacgacgtaccagtcacagcctcaatagccgaattcataatcgaagacgtgtcagacgacgtgtgacccaaaccagtcagtttagcctgagcctcatcaatagccatcgccctagctataccgccaccaatagtcacatcataaatcgacttgaggcccttcttagcaacattgatggcgcccaccattgcggcaccaccaagcgccaacttcatacccttagcaaacaaactacccgaacgctgaccctccgcaggcatcaccccagaaagctgtttaccaacatcacttttaaggccaggcatcttcgtatacaacgacacatatgcggaagcaatctcaccagacatacactattcaccccataatattaatctcgcgagacatcccgccaccggcgcgaacacgcgccaaaatatcgtccacctgcccagacgtaaaccgggccctacgctcatccgtaggcctcgccacaggctccggctgcccctcactattagcagacctgtaatgatccaacatgtccaacacagcccactcgcaccactcaaacgggcgctgccaaccattcaggtgggccgccaactggctagacgtatcggtacacaacacgccagccagccggacagcctcaccccaacacatctgcgggccaccaacactataaacagaaacaccaaacttggtgcggaaatcgtattcgatggccccacgataatcatcaatcaggccgtggagccaaactattcccccagcgaggcacccttaccttcaggcttatattccatccactcacggaaaatctcggccacacgaaccataggaagcccctccagggcctccacagcatcctctggggcggcagcctccaacatagaaaacatcacctcaacctgggcgaaatcagcagactccccagactgggcaatcctggcggcacgacggaaaacgcgggcaggaacagcctgcgctgtttcctccgcatccgccaacacccagctacggtcaccaatcttcaacgtgtaacctgtgtcactcatctatcaacaatccctaaaatagtgtatcagttaccggccggaggattcggatccggctcaggcttaggcggcttaggaggctccggcttcggagaaggaggaaccgggggagtatcagcttttaaagccgtcatccacccccgaccagacaccgcatcacccttatggttaatctgggcaggatacgccttcaacgtcacaccatacccatacacctcgccattcttgcccttaatctcgtcacgatcgacaagctcaacctcagggaaatagtagcgaataacctgatcgccatcaataatatccatcaacagggcatgaacacccgtcgtggcaccaggagaaatatcgaacgaacccgaatcggctccggcagtaaccttcgactgccaaaacagttcgataacctccttcttagactcgatcagctggaaagaaatctcgatagaagactccgtagccacagtgcgaacaacatccgcattctgccaagccttcaaatcatccgttttacgctcaggcttaatcttaaacccgtcatccgacagataccctaaagcggtaagaccgtcaggaaccgtcttcacaccatcaatagtgtcaccggcatgagctttaccaatatagacgtcacccgtaacagcagagcgaacattagacgctttacgtgttgcagccatcataacccccaaaaatatcaaacaattacattaaaacaaaaacaataagcttattcagactccgcaggcctacatataagctcaaaaagcgaatacacatcaaaacgtgcaccatcaaccagcaaatcagggccagtagaccgtttacagtacaccacagggtcaccgtccacaccatcagccagcacagcctcaacacgacgcgccaacgacatagcacgatccggcatatcagaaaacacattcacccgcaaaaaaacacgctcacgaacatgcaactgcgggccaccatccaacgccaaccaaataaggtcaccctcaaactggtcaggcaccgtcccagtacacggtatatcggacagccagccatcatccttgagcacgcgtttagcccacttcctggggtcaccgtagacgatcacgacgcagccccaatcgacctagccagcgtgccatgcttcgcctcaatccttttaccacccttataggtggtgccaatacgggccacagcctcaacacggtgaacctgcacctccgacgacaaaccattacggtattgggccctatcaaacgcgttaccgcccacattcgccgaggctgcacgcctcacacgctcgccacgctcagccaacatcgactgcaccccagaagacttcaacacctcacgaatacccggcaagttcagcttcacattcacatcctgagccacaatctatcagcccttcttacgcttcacattgatctgcgtgcccgcatcccaaccagacattgggtgatgccacacgataggagacccgtcagcctcccacacaacaccccggatacgccaccggcaacgataaccggcacccacaacaggctgcttaaaaagcatcgaccaatgctcatagtcagagtcacgccccgcggcctcatcctcctgcgaaacggaagcatagatagccacgttatggaacacagtctcgacaggcttagaccagtcttccaccttgtcgccaagatcatcgacacgaacagtcggttgaagcatcacaaccgtttcaccatacggaaaactggtcatatcatatctcccacaaagggccagcgtagccgttaatattcgacccgcacgagcaaccctcaccccacaccgtggaacacacctcagaatgcacatatcgaccattaatagttggagtgatagtgaacgctttaccagccccaccatcaccctcacacaacttcttcaacgcagcaatctcagaaggccacaacaaattcgtgggagtattcgaccgtgtcgtctgagcaaacgggcccgcagactcgtactgcacctgacccgaaaccccggtatcattccagcgcaacagggccctgcgcagaatagccttagcggcatccttatatttgaaatccggtttagcgatacagggggcgacactgacagctacagcctccacatcagcgatcatcgcctcaagcttctctctaggaatatcggcgaaaggctcaatatcctcaggcttcaaaatgatacccatcaacaccaccccctgcacacagtacacattcgcttatcttgtatcagttaccagccggaggaggagtcggtgcagccttctccttcaccacagcaaacgaatcaagcgactcgatagccacatacagcacagcctcggcacgaaccataacctcattatggcccttcaagtcacggccagtctgatccgggtcaccatactcgatcagctcgatcgggaagttacgctggaacccccaatgaacacgagagaaatcaccaacaatagccttaacaccagaggcaggcgacatctccggggcacccgaaacagtcgaagaagcaccaacattcagcccacgccaattatccaaaccagcaaacccggcggcaggatacatcggctgaccggcaagcggagaccccttcggatacacctcagtagacagagcaaacgagaacgccggatccaaagcaacaccgttaggaacctgcaaaccagccccagcgataaggccgacagccttgaccagatcagccgtagcggaatcggtggcatcaaccgtcttcttcgtcttatccagcgacaccttgacagccgcggcaggcttcccagtggcaggatcaataccgtggaaagcaatcagatccacggcgcgaccaatcgaagcacccaaagcgggcgaaataagatcctgaagcacacccagacggtaatcggcgtcagcccacataaactcgtccgagacgcgctgctgagtcacaaccttgataggctgcgcagtaaacgccgaaacatcaacagacgcggaaggcttaacctcaccctcgccaacaatcttggcgcgaggaacaccagaaaaaacggcacccttaacagggccgaaaatagtcggctgctccggcgaaagcttcgccaaaacaccagaatcgatagcacggtcacgaaccgcaccaatcatagaaccaggaagctcaagcttacctgcagaaagaaaatcgtcagccatcagaaatcatctcctagaattattgacaagagcatccacaaacgcgacaccctcacgtcgtttaacatcatcaacgggggcactccccgcaagacggcgcacacccgcgccaccaccactatggtcgatcaaacccttcaaagccttagcagactccaccaatgcttcacgatcgccaccgtgcaagaaagcgaccgcatcacccgacaggccacactcggcagccacctcacgcttcacaccctcaagaacaaacccattaatccggtcttcgagttcctcattcttgcggcgaagatcatcaatcacagaccccgcatcaccatccgaggcgcgaagcttctccaactcggcgaaattacttttagcacgagactcccacttacgggcctcagccttccaatccgtgccagaagaagactcctccttcacggaaacatcaccggcatgatcatcgccggcagcctgcccatccttcacaacatcaacaacgtctccaccctttccgggctcaacagcatcattgtcaacattctgttcttcaactttttgatcggccatagcctaaccctacactccttgcggaaaacaacacaacattgttgacccccgtgcgggagacaaccctgtgcaccgataaccggcggcacacaaccggaaaccatcatctcatgtcgccaacagtacgcatagccttcaaaatattgccaggcgactgctgcaacccatgatcatcaacccactcacgagccttctcatacgtcctctgatatgcggcatcagccctattcggctcccaacgcccaacaacctcaaccaccgtacaaccacaatgatcatgatacttcgaaccaaacggacgcttaccaccacgcttatgacgccgagtatgacccgtagtaagcgcccgctctttagtcgtataatccgacctcgtagccaacatggcacaaaacgcgcacggatcaccatcagtcaccctgcgccacgacctaccctgcgcacccgcagaccactcaaccgtgtcacggccagcattcatcacagcacgatcaaaacccgcagccatcgaaccaatcgtatcattcgccctatccgggtcactcttaagaatcttcatagtcgaaaacgacctagccaacgcggcggcagcatcaaactcgtcatacacgatcaaacccggatccacaccattcaaccggcgaaaatccgacacaaacctggcagccaacgacgccgaaccatcatggccggcacgctccaactccacacacaaacgcacatactgcgcatctgtcatcttcccggaatgccacaaacgaccaagctcagcataatagcccgcatactttccggcaaacctgaccgcctcacgctgatactcagtcgcagcaagcctcgacatagcacccgaagccatcgcctatcaaacctcgttagtctgacgagaaatagccccagccagcgccgccaacggatccgaagactcggcacgatgccgcatcacagcctcaacctgcacatcatccaaacccaacatctccaacaccgtacgagaatcagcaggcaaaataccggcacccacaagcttcgtcacagcatcagccgtagccgcccgagtcggcgtcgaagcatcacgccaacgcaaaccaacatcaccaaaaaacgcggcctcatcaacactcgaatccaacgcccgggcagccaggaaaccaaccgacaaccaaccctgaccaaacgacgtctgcctgcgttcagcacgcttcacaagccgagactcctccgcagccaaagcctccccagaaggcgggttagacgtgataaacccgaaatagcgttccggaacagccgcctcacccgcagtcaactgcgccaacaaacgcatctgatccgaatacggtgtaggagaattcacaggaaacgaccccacattcggagtgtcaccatcatcatccttatccacagcccacacagaagccatcgacaacacccagccaggctgcgaaaactcatccgcgctcacaccagtcacccaacgctgaggatacgcataaaaatcacgattcacagactgccccaacagtgtgcgcacagcctcatccgtgtaagccctaatcgaccgagtgatctccgaacggccatcaatcctcgacgtacggcgacgattcacaacaggcaccaacggaacagcacccaacacattctcaatacggcccgtctcaacccactcacgagacccacgccgctccacctgaacaatcacatcaggcaacaacaactcagcctcaacaacctcaggatcacacgtctgctgcaccacaagaccagcatccaaacgagacccgtcagcagaaaaccggccagtacaattcttcggcgactgcggacgaaccaacaccgacccatccccctggggaatgatcgccacaaacgacaacccaaaaatcagtgcatcaaggtgaacgtcacacgacgccgtagcaagccgattcgcagcatacacaccatccagaccgtagccgtcaccattagtccagccaagccaatccagacgctcctccaaagcatccacagcaataccaggccacgacaccaccgtctgcacacgctgcaactccggcggaatagccacccccaaatcacgcacccgattagagccctcatagtagccctcaatacggcaatgccacgaagacaacctcttaatacgatcgtacatgccctcaatcagagccaactcatccgagttcataccacagacacccgcttcctaccagaccgttcacgccgcttcactttaactgttttcgcaccaagatacgccagcgacacagcctccaaaggaacctcagaaccatccttaaacgaggaaccccaaccccacgcagaacccttcttcttctgcacagccgacctcacagcaatatccaacatgtcacgcctcgaatcagccctagggtgagaaaccacaccagaccttacaccctccaggaacgcctgacacgcctccacataggtgccagtatccgcaaccaccacgccacggcccggaataccacgatccgtcaacgccttctgcaacaacaccgaaccagacccggcaaccatgatccggtcagtatcaccccaacgaaccgccaaccagtcagccaaccggcccacaccatcaacaatcgttcccgacaggccatcaataacctcaacatgaaccccagcatcagtccggccagcacccgccaaagcaacccgatccccagaacgagaaaacgagacaccaaacactttcccgccaaccagactcgcctcatccaccgcagactgagcccacttatccgccggaaccacagacgcagcagactggccacgatcccaccagccaagccgctcccgagcaaaacccgcagcagacatcgactcatgctcatcgcttacggtcccaaaattcagacgacgccccaacgccggattagtgtcacccgccaacttccgccactgccgcgacacatcatccggatccgactcgtcaggaatcgaaaactccgtccacgcaaaccttttaccgccaccaagcgcctgcccacgcaaacgcaacaccacagacccatcagccaacggcccaggcggcgtacccaaaaaaatctgctgcggatcacccgaaggagccgcagacaccgtaggaagcaaagcctccaactgctcatccgacaactcctgagcctcatcacacaccaaatcatcaaccgtaaacccgcgagccgaaccacgagaacgggccacaaactcaaccgaaccccaacccggacaaccacacttcttctcaaaagtcggacaatccggatgatgcaacacaatagcctcctgaccattcgtcgcccgaatcgacttcaccatacgatacaagtcaggaaactgccgctcattctcaaaaaacgaacgcaaccgcataaacgccttacgagccgacttcaactcgtgagccgtatgcaaaatacggcgaccctgaatagtcgccttaaacaactccacaatctccaaaatagcattcttgccattctggcgaggcacaaacaccccacacacacccgaagcaagcctgccattgctaccaacagcaagccaatcatccaacacctgctgctgccacggatcaggcgtcaacccatacgcacgacccaactccccagcatcaccgccagcagacaccgaatacgccgcagccacccggtgacgaggaacctgagaacccacaacaccagacacctaatcaggcccccctgcgcttcctataccggtcaatcatcgccaccgcagaaccgccaccacggccaccagacaccacatcaaccgaataccgatccaacatacccataaaagccttcacatgagcacgcaacgaagccaccaaatccgcgcgaccctcacgccacacacaatcatgaatcaccgcagcatccatgagaaacaaccactcctcatcagacacgtactgcgcgcgactatcctcaccccacacacgccaccaacgacgcgtctccccacaccaatcacgaccatcaggaagctcaggctgcacaacactcaccaccaacacaaaaagtcgacaaacatacaaaaccacaaaagggaggtatttcac

SEQ ID NO: 11 - DNA, 29637 bp, Propionibacterium acnes bacteriophage
ctagacgcctccaggagcctgatacacgatcaaccatctctgcatagatcatcaacccctatcctggttagctacgcctcaactatgtggacagtgtgggatgctaagagggaagaagtggtcttgcacgggtgtgcagggggtggttcccgtgggggttggcgggtttttcaccatggaatcaatgtttttgtggtttgttgttggaattgaatgtttggttcgctgcgattgcctttgcttctgttgcatgttctgcagatgatttgcccgttgtcgagggtgttgagtcctcccctgctgacgggtgtgatgtggtcggcttcggggcttgttggtagatcgtgtgtgtcccaggctatctgggctccgcagagtgggcattcggtttggccttgttgtcgggcttgggtgatgagtcgttgccgccagcgccggtgtgaggcggatgcggtgcggttggtgtgtgccatcgcgtcccctgatctcctatggcccctgtgagcctctcattgcccctctaacagcctgggaaccgttgggtgtatgaataccttgcccttgccctgctgttcgatcctaggccctgttttgtgcgtttaggggggtgttctgtttgtgcctgggtagttgttttctccactaccccctggcatgtgaaaaatatcacatcgccccccagctgtgtcaaaaagagaaggacacgaaagaaaaatgggggtgggtgtgtgttcgcgcttcacagcttggcgcttggcgcctagcgttaaaggacacaggctaagcgggaacaccttaaggttttaaagtcttctacttataatatacactttaagtcttacctggtgttaagggtttaagcgtgacacgccgtacgccttcagccgaacacgctaagcctgaaaaggacacgggtgaaagagtgtggggagtgtgcgatgggagcttgcgaccagaagcacacgagacacacggcgacaagtccatcagcgttgacggtaaaggttcctcttctcccctgatgaagaaaagaagagaagagagaaagaaccaaagagagaagagaagtaaagaagttaaccccttagctcttctaaaacttttataacctataagctttaagacttataggttataatattaaagtttaagactgatggttaactttaagtacttaaggtttttaaagtcttatagttactttaagtgtttaaagcttataagtctttaagtcttaatagttattttaagttttaaagtcttaaacactgatgttaagtttatatccttaagtgctaagcctttaaggttttatacttaacttaggtgttaaggtctttatactgatgctgagccgtgaagggctcagtgctaagtgtgtaagcctttaaggttattaattaactttaagtgctaagctcttaagtttacttaaagtgtttaaagctttaagactgatgccgagcccttgaggggctcggtgctaagctatcagcaccttagcgctaagcccttaggtctttaagtctttggtagactgatggatgtaagggtgaaagccgcgtcagcggatttcggccttgcgtccagctggctacctgtccagcctatcatatgccacctgggatgagtcaaactggtggatttggctctataggcgggtttgaggggtgtaaacgggtgtttttggtagtaaaggtccaaaaattaaacctaaacttttccttaaattttcttagagtcttgtaacctttacaggtggttaaggcggaaacccctagtcagaacgggtttcactcccggacagctgtcacacttcactcttgtgtcctttccgaatacgctaggcccatcagtgctgagggtgttccctcaggctttcgagtactcgtcgctagggctcctcgtactctcaagccttccctggtggcgtgtactcctttcagggctgtgcctgatcagctgagcctgttcgggctgatgccgagcccttgaggggctcggtgctaagctatcagtgctaagaccttaagacttgaaggtgtgaaggctgatgcccccctcttctttttaccgcgtccttcttccctcttagcatcccacactgtccacatagttgaggcttagctaaccaggataggggttgatgatctatgcagagatggttgatcgtgtatcaggctcctggaggcgtctagaatcgatcagaatgtgctgggggtataaatacctagcccccaccccgtaaggcgctcctaggcgtcgtgtgaaggctttaaacggcatttctgggctacacccttcacaccagatcggcagagtagcctcgagaggacacaccatactaggcgaatgtggcctatctcacacagcagagggtgtagattccatgcccagatatggcaccttgactcccgtgatgaaagccagggtagatctgccgggccatctgccacacccgctatcacccagacatacccctgaggcgccctagaagggtcctagaatcgatcagcagggtccaccctgcataatcctacccctagaagatttgcgacgctgagagaggcaataaaggcttaagtgagatacgccacatcccatgccacacccatatgaaacgctcaatccgaatgagcgcagccttgactgtgaggtcgcaacctacacactctagaaaccacaacaacccctacaccaccgaaaggaacacaccctcatggatggcacactcatcaccccatccttcacatccctctacaggcaaaccgaaatcgactccctcagcctccacagcctcaccggagaccattcagacgacatggatctggatatggtgcgccgcatgtaccacgccaaagtacaagaagccatacgactcatccggccactatggactgtcaccctcgacggcgcagtgtacggcgactacgactggcagccactcaccgagaacgaggccgaggaactccacgacatgatcgacatgatcgacgtggacgccatccttgtcgcatccacccgataaaccctcaacaacgttatcagcaactaaaaggaaataatcatgcaaaagatcgccaaccacttcacccagctctacacccccgccagctacgactgcccaacacccttcgacctgacacgcctcgaaaacctctcctgcgaccacatggattttgagggcctcgccgaaacctaccggcagagcgtggaagccgaacttcacaagctacgccccaacacattcatcgcatccgacggcaccgtattcagccacaccgagtggaagccactcactggtggggaagccacacaactctactggaatgtgacccgcatcaacgttggccacctactcaccctattcgcccgataaccccccagccacacaagaatcgctcacacaaagtgagcgcacacttgacatgggccaccgacaccaccatgattaatcatgtcagcaacgaacaacaccccggaaaggggacacaaaacatgaacaagaaaaacggctacaccatcgccggaatcacagccgccattattgccgccgcctcattcatgccagccccagacgacaatccgccactcgcctcacagccagccccacaggccaccacagtcaacaccgaatggacccccaagactacccaacagcgcaaagccgagaaaacagccaagcaggcagccgccacccgctccctacaagccgaacagcagaaagcccacaagcaagcccaagcaaggggtgaagaaaccgccaccggactcaccatgctcaccgccgcacacacctgcaaccgcaaagccgaacaacaggccgccgcacacggtgtcaactggaacggcaaccccgacatcgacctccaactccacaaaattattggtaaagacaccttctccatcgtctacggtgcaaccgcgaaacagcccggcgcatccaaactcccagtcaccgtccactgcctcgtcaccggaacagaagaccatccgcacgtcaccgacctcaacatcaacccgcaacagtaacccgccaaggagcatcccagctatgcctctcctctcccactacgctgtcaccaccggactcgccgacacggcacacatcattcaccacaccggcggcacactacgcacagccaccgatatcgcctcccgcatcaacaccctcaacccagacatcaacctcgaccacgaaatccaccaactgttatctatcgaaaccgacctgtacaacatttataaaaccatcaacaccattcttcaggagcaagcatgaacacacccaacaacaacattgagctacacagctacgaaacattcttcaccagcctagcctggatccaaggcggcatcatcacatggatgtacgcaaccggcaccccacacaaggcagccctcgccattattgccgcatgcgccctcgccaccctcctgggtgcatcaaccctcaccaacaatccccgagacactaaatgatcacaacacccatactgatagctgaaaccctcgccatcattattctcgccgtcgccctagcccacaaccccaaccagtaacccacccttaaggagcacacatctcatggatgagcccacccgcatgtacaccaaccccgacaccggtgcccgaaaagaactcaaactctgcaggctctccctcatcgacccagcatcccttcacgccctaggctctgtggcaggatacggtgccaccaaatacggcgacaacaactggaccggaggatacccgtggagccacagtgtcgacgccctctaccggcacctactatcatggcagcaaggcaacaacctcgattatgaatccgggctaccgcatctggcacacgcagcctggcactgcctcgcactcctcgcataccagcaacaccacgccggccaagacacccgcaacccatggaacaaaagcgacaagtaatgcctctagcacaatacccgaaaaccatcaaccatccaggccacatctcctacagttcactcacccagtgggccgaatgcggagaaaaatggcgcctatcccacggctaccacgcccaacaccacacctggtatgccaccatcgccggaagcgccatacaccacatcaccgaacaatacgacctacacctgtacaaccccaccgaataccctgcactaccagacaaactctcatccttcaaaaacattttcgacacccaaatcgccctcaccacgtcagagggcatggagattaaaccctccggccgagtatgcaaaaacatgtgcgagtcgggcgggccacacaagaaagactacgactggtggattatgtacggccaagtcttcgttgaccggtggaaaaactggcgcacaaacaatccacaataccacacagcagtcctagacggccagccaggcatcgaatacccagtcgaaaccaccctccccgacggcacccagatcgttggctacatcgaccgcgttttcaccgacactgacaccggcgaaaccttcatcctcgacctcaaaaccggccgtctaccagcagacagtatgcagctgcacacctatcggtacatgctcaaccaacacgacatccatgtgacaaaaggcatgttttggacgccagccaccagccgcaacgacgacaagtccccgacacaaggcacatccaccgaactctacggccttgacaacaacacctaccggcatgtatcatccatgtacagtcaagcaatgaaaggaatcagtcaaggcatcttcgtcccacacgtcacaacactctgcaaaggatgtcccgtacaagacgcctgctgggccgtcaacgggaaagacgcctacaggtaccctacagaaaccaccatcacagccccaacagaagaaggcaaggagcaccagtgaacgataacaccaacagcactgatgatcgcatcaccgtcacactcaaatacggcggagactatgccgcaccatggaccgtcattaggggagacaccgccgaccaggtgaagaagactatcatcgacctgctaggcggactcaaaaacagctcggcggcaaggaactgggacctgtcaacactgatcgccacagcatccatcatcctccaagaccgatacaaccaggccgccaaagactacgtagacaacatcgcatcagaaggaaacaacaccatcatcgacaaaatcaacaatgcaacaagcaaggcacagctagccgaccttctcaaacagtacaagaagaccatcaccagtaacagtgacgtatccgaggctttccgcactaaacggaacagccttacccgataaaaccgacataaaccaacaaaacagtaaaggatacaacaatgggactcgcaaactaccgaaacaacagcaacagcaccttcttcaacccgtcccgaaaccaggacgccaccgccatcgccttcaaagtccacgacgtagaacacaacaccgaaggctacggtggacagaccgccgatcgcatctacgctgatgtcacaatcttccacaccctagacgatctcaacaacggcaccccagaaaccatccccaacgccattattgagaaagcacgcggcagcaacgatcgcccacactccatgatccgcgacctcgaaacctaccttggcgaagagcaggccttcaaactcgccaccgtgcgcaccaaaaacgggttcaacgcggtcgtgctcaaaccattagacgacgccatctacgacctcgtagcagcatatgtcgaccagcgagacagccagcccaacaccactggtagcgatgatgtagacatcgactccatctgaccaccaatacacatccaaccgatagatagataaggtcccgatgctctctctccaaagatccttcgagagagcctcccaaaccgcagccgagctgccccgcataccacaactagaacccctctacaacaaccaggacatgcacatccataaaggggatctcgtcatgattgcggggcggtccggcagccaaaaatccgggctagccatgttcatcacagcgatgctcaaccagcccgccctctacatatcaggggacatgacaccctgggaggcttccacacgaatcatctcactcaacacccaacacaccaccgcccaaatacaacacaacatcgacggctacgggccagaatactatcgagacagcatccaccacggccaacacatcacattctcattccagtcacccatcacatggacagacatcaccatggagctgcaagcctacatggagatgtggaacacctttccaccactcatcgttatcgacaacctgatggacattcaagactgcgagagtgactaccaggcccagcaagaagccatgcaatggatcacagcattaggtagggatactggctccaccattattgtcacacaccacgcaaccgacaaaaccggctccgacatcgaacacccgccagcacggcgagaaatcaaaaacggcctctccgaaaaaccacaactcatcctcggagtctcattgtatggtggcgaggataacggcaacggcctatcgatcccggcagaggcacgcatcgcagtgctaaaacagcgcacaggcaaatccagccccgacggcacccgatacgagcggctacgagcctaccccgaatacacattcttcgggcccctcgccgaaaaacagccctggaacatgaccacaacacacaaaggactatcatgtcgacacagcaatcacgcaaccggcgggccggcgcagaatgggaaacacgactcctccaccagttacgcgacaccggccatgatatagaacgcctccatctgaacggccgcgaagacgagggagacctgatcctcacaaccggcaacaaaacctatgtgatcgaggcgaaagccggacagccccatctcgccgaattcgtgaaacaagccagccgggaggcacgcaactacgaaacacaccgaaacaaacaaaacaattccaccatcggactcgtcgtcatgaaacagcgcaacaaaccatggagcgaagcctatgtggtatcaaccctcaacgagctcctcccacacctctgacacccgccgcctcctcaaccactaccagatacgctacaacccgtcacgaaacgagcaacacatcctctgcccgttccacgacgaccaccagccctccatgagcatcaacctcgacaagggcgtctggtactgccacacatgcggcgtcggaggcggactcgccaagctacaacaacgattagaagaagaaaacccgaatgtacgacagcatacgcccatacaacattgcggaacgccgccgaatccagaaagcctcagccctctacgaaacccacctcgaaaacatactcaacctcctctcagcaagaggcatcagcgaagaaacagcccgctaccaccaccttggatacatcgacaatgaccccatcccaggccacgaaaactacaaccagtgcatcaccatcccctacatgtaccccacatgggaagggccagccgaaataagaaaaatgcgtttccgctgctcactcccgcacgactgcaaaacccacaaccaccccaaatatttgacaccggcaggggacacaggctccatctacaacatggccgccatggccaacccggcagccgaaatgcacatttgcgaaggcgaattcgactccatgatcctcgaacaatgcggatggtcggccgtcgccctacccggcgcaacctcgtggcaaaacttttggaccaaattcttcgaaggctacgaccacatctacatctggtccgacccagacaaggcaggcgaccagatggcccaaaccctaacccaagcactaccgcaagccacccatgtgcccctcactgtcggggatgttacagacacctacctgaaaacaggcaaaacagggttaacacaagccctcaacacagtgctacaataaaaccagacaagcaacccaaacaaagaaaggcatataaagcatcatggatcccctcgacacatgccccatccccggccgccgcgacaccagcaaagccgccaggaggcgcatccgcctcgccatctgtgcagaaaaatgggctgatggtgaagacccactccatatcatgcacacctggggcaccacctatgatgggatgcgatccatgatccgcgccaaccccgacattaaactacccgacgacatggccaagcgtttacacaaagtatgccgggaagcctaccccaaaaaccagcccaacaggcaccgaagcggatgggacgcctacgagaaaaactactacacccacgaaatcctcttcctcgaccagttcaacatcccagccctcgaaatcctcaaccggctcgacgtgtcatgggccatgtggaaacaaatcatcaccgaaaaccatctcacacggctccaagacgaaacctacaatgcgtgccactggcactatctgaaacagcaacaccccgactggaccgaccagcaaatcacacaagcccaacacgccgggaacaacaccttcaaccagttcatgcaagacgacaggccagcattgtgagcatctcgttcaaacccaccaccaaagacaaacgcgccatacgcaacatcattgtcgacgcgtggctcgacgaaaaccaagtacgagacatgcccgacaaggtactatcacacattatcgagtactgctggggacgcttcacagacaacatcaaatacgctgtagctgcccaatattggaaagggccacacaagcccaatagtgaccatcaacggatcattgtaggctatttcaaaaccatcaaacaagccacgaacgcagcaaaacaattccactggaacacccggctacaacaacaatggaaaacatggatactcccagtccacaacggcaccgtgtccgagtttttcacccaacaaaaaactttgctagacgagcaagacgatagcaatagcgagctgccggagcatctacaaaacgtcatgtgcggcaaaacactcaaccacacagacggaaccgtatcgtggtgcacccgcaaaccaggacacgacggcgactgccgcacaggatggcagcccatcacacaacccctaggatatcatggcaaccaaaactgaaacccttattcaacgctacggcaacaaggctgcagacgtgctcgccgacaaaaccatccccgcctcgtggctagcaaaacagctcacccaagcaggataccccatctcagccaccgttattaaagactaccgccgcaaacaagccaacaccacccagcaagaggaggatacccgatgatagacaatatagaccggctactcacacagctagccaaccacgacaacgccatcgacaccatcgacgacaatctagccaatggtactgtacgccgcacacgcatctccgaatggacactccccaacggagaaaccggccgatccatacaaaaaatcatcgaccaccaacccgcaaccaacccctacccgatcgacgaactcgtcgataaactagccgaatggacacccccaaaacccgaacaggacacccacaccgactacagcactgcggccttcgtcatcggggcaggagacttccaaatcggcaaaggcatccccggcggagaaacatcacacttcgccgacgactacctacactccctcatagtcgcaaaacactactggcaacaggcaggcaaaccgcaacgagtccacattgccttccttggcgacatgatcgaaggatacgtgtcacaaggcggcaacaacgcctggcgcacacaaacacccctgacggaacaaatcaggctcacccgcatggccatgatgcaactcgtccacatgttcgaccactgcgccaacgtcaccatcacatccatccccggcaaccacggagaagccgtgcgcttcggcaaaggagtcaccacctacgacgactccttcgacgtagactgctgccgcgccatcgcagaagcctaccaactcaccaacaactaccccaacctacactttcacttccccagccgagacgaaatgaccaccaccgtaaacgtagccggggctactatccttcatgcccacggacaccaatggcgcaacaaccaacactacgaatggtggcgcggccaagaattccacaacggcaccacatcccacatcctcatggccgggcaccggcaccacctagaaatctccgagcaaggacaacgcaccttcatccaatgcccatccatggaaggagaatccgtctggtataggcaccgcacaggcaccaccggcaaccccggactcgtgtgctacactatcaacaacaaaacaccaaacaactaccagatagccagatgaaagagatgccatgagcagacgaccaacaaaagcagacctagccaccaccgcatcgtgggtgtgggtcacagaccatcatctacgcacactcaaccgggcatgcaccaaaacagccgcacactaccccgcaatcagtgcagacgacctgtaccaagactctttgctatatattgcggtgcgggaacaataccacaacctagacaacaaacactacaccaaaatgtgctacagggtagccaaacggctagccaacaaaaccatacaacacctcgaccaaccgaaacctttatccgatattattcatctagccgacaaccaaacaagcaactagaaggagaacccctcatggttaaaaccaccatcgacgacggaacccaaaccaccgtgctacaaaccgtaggcaccaccaccacagccatcatcaccgacaccgaaaaccccgaaaccatcaccgccaaatacaccatcagtaaagacggcacagccacctacagtatcagcggaaacacctacctcggcgaccaccaacacattattaaactcatgtacgactactgccactgtgtgggacgattcgacaccagcaacaccagtaacatgaacgacttgtttaaggattaccagtgaaccgaacctacaccaccgccgacatcatccaagccgcccaatggatctggaacggaggcccatggaaaccctccgtggagccaggaatgccacccccaccaaccgcgccacaacaccacggcaacaacattgttaccatgatcgatctacagctagccatcgacgactacaccctcacctgccagccatccaaacagcgaaaacacttcgcccgactagccgcattccgggaagtctatggatatgaccaaacatatgcgtcggccgcccaacgactcggagtcacccggcagacggtgaaacagtgggcagaccaaacactgatcaccctcacaggctacgcaaacagtagatactatccagacgacagcgacgaaagcacagggatgggacaacagccatgaacaacacacacaatatcacctacaccaccctcaacacagcgatacaccgtatcgtccaacaacagcccaccaacatgcaacagctggaaaacattgttgacagtgtcgaaaaccagtacggtgtacccatctccctcgacaacgtgaaccttaccgttaacgaagtcagcctcgacgatcttgctatcgaccaggacacgctagacgagtgcagcgaaatcttgtggttttgcgacagtgcaggacacccaaacaacagcaacacccgttgcaagagcgaggaccagagcccctatgcaagccaggaggcgctagactggctcgccggaatcgcataccaggccaaactattgcaggcggcagccgacgagatcatgtgggctatcatccgccaccgcgacaaccataaaaatgttatcggccggaacgttctagaccaggccaacgatactatctctgcctgcctccacctgtatcagatgctcgaagacactatcgaccgcaacgaatcatagccacaccgcataaacagaaatagtgccccagcggcaaccaccacacgatcgtggcagcaccgctggggcatacacacatattcaattatgcaacagtagactctaccgtgccaacctccgactcggcggcacgccgaggctcatagccggcaacatccacatcatccatcggctcaatcatgccaggatccgacacatccaccgagtgcggctccaccatgcccccatcgtcgggtggaacaagccccacatcaacctgaggcttgccgggcttgccggccacaaacgacgggctaccaaacgaggtagcaaccgacagtattgcagcaaccgtagccgtgatcagggcagactcccacggcaaaccacgaaacgactccgcagtataagtcacacccgcagtaaccccgagcacagcaacaaacgtttgcacaaaagtcttagccgcccgctccagtaaacctaaccaaaactgtttacccacaacaaaccaccatcactttttcaaaccgttgacagcagactcgagcctgtcaatacggctacgacactccagcacgtaataccagatgctccacaaagcgtcttttgtgcgccacagtttccccgtcaccggattcttcacccacgacagggcatcaacacatttacgcaagtcaccattctgaacctgaaccacaccaacatcatggtgtagcttattcaccgaaccagtaagctgagcagacaattgtttaatctgatcatgcaaggctttcacatcagccacagttaactcctcactaccactaccgccgttgacgacggccataaacctgtcccacggaaaccacggccccggatcgtcatgatccgactgatgccacgcatcagtcacatccacatggccgcacacaccccgtttaccggccttcaaatcggctgcactaagcttccttttcggaacattatatttgtcacacaaacgtctacacaggatggcagccttctccaccgcaggccacaccctaggatccagccactgctcccgagtgtaagcatgccccggcacacggaacgaggcgtgcgaacccccatccgcgcaaatctcgatacccaaactatgcggattcggcggggcatgccacccaatcgtagactccgacaagcactgcactgtctcactaatatcgcaaacataatgcgccgaaccacccgacgatggggacgcgaaatagtttgccgtggacaccgcccgccccttacgggaagcagacggaaaccccacatccgggcatgttgcgtgaatcacaaccctattcaccggactattcgagccggccgagtgatgcgctgcaggaatgtatctcaccacacaccacctaacaccacaatcaacactagtaacacccttcccttttctttttacttgtgggatgatatagtcactataggcgacggtttcacaccctggcaggccaccgagcccgatatggtagaagccacaccgtcactatatttcaccatcaggcgaccctcagaacagtacacagacaccaccgagcgcccatccttaccatctttaccatcggatccgttcacaccggcagaaccctgcggaccctgaggcccaataggaccccgttcaccctgtgcaccttgcgggccggcaggacctgaagggcccacatcaccgcgctcaccggccgaaccatcacggccatcagcgccgttcacaccgtcagcacctgcacgacctggaacaccatcatggccatccgatccattcgcaccaggcaacccgtcaggacccttcacaccattcaaacccggggacccctgcggaccaacaggaccaacaacacccgacgaaccattaacaccatcccggccgtcaaccccagcgggcccttgcgggccacgcacaccggcaggacccggcacaccctgcacgctacgctcaacacgctgagcatccacacacaagccagactggtgaagccgcaccgactccactccactcgaagcacacacccgcttcacacgggcagccaaccctttggcggctgcaccattcgactgggctcgagtctgctccgaatccctttgggaagccacagacccataccgcaaagcacccccagccatcgccaccaacaacacaagcgacaagaacagcaatatcagggaagccttctcaaacgagcggcgctgccgcttctcttcctccaactccctcacaattcaccccccaccaccatcaacagtatccttcaaaaactcgggcaaatcaggcatcttcacaggctcaacatcatccggcagattcgcgttatagcggtgaacaatatggcgaatattccacgtgtactcttccatcgcatcaacctgcgcagacaactgcctcagcctcttcttcgacctgtacgtagccgcctgaacagaacccaaaaccgtggcgatagcggtacaaagagaggccacgagcgtaggtgtaagccatgacactacagccccctaccactacaacaaccacaacacgtcacatacccgcaagccgtacattacacgccgacagcaatccagttagccaccgcaggcacaccgttaggcttcgaaccatcattcgtgataaacgccaactgaaaatccttggcagtaacattatacgctttcacatcaatctgtgtcgtgccaccagccgccgtagccatagacgccaccaccacaggcggactagtgaactggcgctcaaacgggatcgtgtaagcatacacagcagacccgccaaactggatctgcttagtgcccgtctcaatcctcggagacaggagcatccactcgttagcatgattagcccacacagcccccgaaggcaccatcacacggtcaccctccacaggggtcgggtcacacgcagcagactccccaaacgccacacgggccgccacagcacgcctatccagctgctgctgcaacccgttagacgacaacaccaaagtagccaacaactgctgatggtacacgccaggctcggcccttaacacgtcacgggcacgctccgcacgccccccgggaacaatctccaacttggctgtgttctgctcccaatcccgagacaacaccacatagtcgtatctagtctcgccagggcccggaagctgccccgtcaccgtctcaacactattcgaagtgcacatcaccccgtgagcccaagcctgccccggcatgacctcacacaacactgtggcaccctgaacagtcgtgccgacacgaaaatcgtcaggacccttaaccgacggcatattacccatcagaccagacatttgagcccaatcatactcggtcaacacaccatcaaaccctttacacacaatacccacaacaaacccctaatcttttttagaacttttgcaaatcccgcacacccgcagccaaaccagccacacgccgcgctagcaacgccgacggattatcctcataatcccccgcaacaggagtcaccttcgtccaaccatccccaggcgaatcacactccacatcaatctgccgcacaatctccgcaatcgggccagaacccacatccacatagatcaaatcacccggcatcagattgcctggcccaaaccgcaacacatccgactcagccaactcaatcttaaaccccgacgtcgcccctaactcggacaacacctgctcagcctcatcgatgagatgcacatgttcagaatccgtgttacgggcatccttaaacacctcgacacgatcaaaccaatccccctcggccatcgaatcaacatcctcacaaaacagccgatccttgccctcgccgcggccaccaaccaccacagacgtagccttcggggcgtcacgcacatactcccacgacacaatcgacccagactcggcagtcaacacatggtcacgcgtcaccgcaggcacacaatcaaacagcaaaccccgccgatccagcttcgcattctcaaactggttcaccgtgacagtcatccgagcccacgacaacaccggcaacagtttgtccgcaaacacgtgaaaccgggcctgaaaatccttaatatagcggccacgactctcatcatcggtcagaaacacatccggcggaaaacgccacgcattatcccgcaacacctgcttagccaccgactcagccgcacccgaatagtgggcataatccctgtcggcacgccactccgaaccaaccaaaccaggacgataattcacaggccacatcaacatgcgccacaacaggcgaatatcatcctcacacatgatagtcacccgcgaagaacgccaaggacccacaccatgcaccttacgcacaggcccagaaaaaatctggccaccaccataatcaacaaccagccgcgcacccggcttcgtcaacccgtcaagccttgaatgatcccccgacaccaccaactccagcgtcgacaaaccattccacttcaacgacaacttcaacgactcaaaaaaattgataggcgccacacgacgataatccggcgtaaacaatgttacatgcggaacaagaccagccatcaactattcaccaagccctcaaaaacctgtactgcaccgacacaacaatggcacccaaaccaaccatctcaatattcacactccgagaaccgccaggcgggataggcgcaaactcccactccttcaaacgatccatcacatcctcaaacccgttcaacaacgcagactgtttacgaggatccgtgtcaatagtgatccaatcaaactcctcgacaggatcatcagaagacacacgcaaaccatcaatctgcacagaccacgactccaaaggaccctcaacacgaatcacaggccacgcaggcacatcacccttattagacagattatcccaacccgaaccaacacccggcgtcaacaccacaggaaacgcggtacccttcccgccgaccgggccgccacccaaccaatcctgcaacttcgcgttactgaaacgaaacttctgctcatccccataccaaaacgggtcatacgctgtcaaatgaagcacatagcgggcatagccacgattcaccggatccacagtaaacgtgtcatcagccgaatcaaaccggcacttcaacacacgctcacggccggcaggagtcttcaccgacaactccccctcccccccgggaggaaaagcagaccacaactcgtcatacgccttcaaaaaaccgtcacgaaacccgcccaccggatccggagcaacacccgacaccaacaccggtaatgtcacctcgcgaggcttcacattaaacccgcgccactccgagccgtgcaccccaacatgagtttgagaaaaatgctcaacctcaggaacacccaaaccgcgcaacgaatcattcaacaacatgacaggagacgcacccgtataatccgtcaaatgaagcacacgctcgtcgccaaacagcggatccataaaccatgtcacagtcaaaccagaacgatcagacgggtcaggaataaacatgcacaacacccccaatcacacgtaagccaacgcgttcaaagcgtcacgctgctgccgctcaatccgcttcgcaaactcgttaggatcaccataagtaggcccattcacattcaccacaacactcttatcattcatacgctgatacctgccatacggggtaaacgagcccacagacgatcgcacaccaaaccgggcatccacagcatccggaagccggccagccacacccgacatcgcatccaacgccaaaccggcattaccagtaataccctcagccaaaccggcaacaacctgccggccaacctggtcacgaaacaccctagacggggaatgaatacccaacaccgacttcgccgcattagcaacctgagaacccatattacgcaccgtatccaacaggccactcatagcattccggataccattacccaaaccagacaccacatcacggccagcagacaccaacaaagaccccatgttaccaagcgcacgccgaatattgccaggcaaattccggaaaaaacccagcacaccatgcacaccactagacacagccgagcccatagcgtgcatagcactagaagccgcactccgggcaccattaaacccgcgcacagcaccactacgaaccctagacgccatcgacccgaaaaacccgccaacagcagacgccaccgaagacacaacactccgaatagcattcatcgcagaagaaacagcaccacgggccgcgttaaaaccagacctcacatgagaagcaacagaagaacccagccgggcaaaaaaccccacaaccgcgttcacaccacccgaaattatcgacttgaaaccgttaataaacgctgacgtaaacgctctaatatgattccagccattcaagatggccgtgcccatagacctcacgccagacactaaatgattcacaacccatgagatgacacgggtgacagtcccaataatccgggcttcagcagacacaatagcgccaagaatacgtgcaacaaacccgatcacagctgtcacaatcggcatcacaaccggaataatgcgggccaccacctgcaacacaaccgaaacaacctgcaccaccacacgcataatcgacatgatgactggtatcagcgaccggatcaggccgatgataggtggcagaacagaaatgacagcacccaaaatctgttgaatcacaggcatcaaaacaggcaccaactgcatgatcacgccaacaacctgccgtatcacagcaacaacagcctgcaacaccggcatcaacgccggcaacaacatggcagcaacctgtgtcaccgcaccaataatctgcgtgatcacaggaaccagccgggcgacaagcatactaatcaaaggcaccagctgggcaaccaaaccggcaaccatgccgataatctgaccgaacactggcgccaactgtgccaccagcccagcaaccaaaccaaacagcggctgaatagcgaccatgacctgccccagggcttgaccaaccacaccaacaagctgcataaccgaggcgcggaactgggcgttagtggcaaacatggcagcaaacaagccgatcacaatcccaacagggccacccagggcgcgaaatacgccgccaagcccgccagcggcacccttcaaagcaccaaacgacggcaacagattcttcaacgcaaccgccaacggggcaaaccctgcaacaagcttccccacacccgcagcaacaataccaaacactgcggtgccgccagcaaacatggcacccaaattcaccttaggaacaggcaaatgcattcttgcaaaaatgcccttcaactgctccactttggcgcgcatctgtgcattcattcgagtgatcatagccggcatacggttaatccacgccaaaatagacggcatcatacgctgaataccagcatcgacggcagcaaacatcggcttcacagaatccgtgatagacttgataaccggattcaacgcaacaaaaatctgccgcaacccgttaagaaacggcgccatagccgtagcaccaagataacccagggcacccttaacattcttcatagcgccctcaaacgtctgaccagacgcctgcgcagcaccacccatgccaagcttcatcgcagccgcaaacgtggcaaaatcaatctgccccttcgacaccatctgcgacacctcagcagacgtcttaccagtctgcctggcaagcaaagacagcacagggacacccgccatcgtaagctgcaacatgtcatcgccctgcaacttaccgcgagccatcacagacgtaaaaatagcgcccgtatcctgaaacgacttacccgaaatataagacacatcagcgacagtcttcaacacatccgtcatctgcccgccagacttcacacccgaagcagacaacgccgcagcagtagaagccgcatcacccaacgcatacgacgtaccagtcacagcctcaatagccgaattcataatcgaagacgtgtcagacgatgtatgacccaaaccagtcagtttagcctgagcctcatcaatagccatagccctcgctataccgccaccaatagtcacatcatagatagacttgaggcccttcttagcaacactaatagcgcccatcatcgccgcgccaccaagcgccaacttcatgcccttagcaaacaagctaccagaacgctgaccctccgcaggcatcaccccagaaagctgtttaccaacatcagccttcaaacccggcatcttcgtatacaaagacacatatgcggaagcaatctcaccagacatacactattcaccccataatattaatctcgcgagacaccccgccaccggcacgaacacgcgccaaaatatcgtccacctgcccagacgtaaaccgggccctacgctcatccgtaggcctcgccacaggctccggctgcccctcactattagcagacctgtaatgatccaacatgtccaacaccgcccactcacaccactcaaacgggcgctgccaaccattcaggtgggccgccaactggctagacgtatcggtacacaacacgccagccagccggacagcctcaccccaacacatctgcgggccaccaacatcataaaccgagcaaccgaaccgggtcctccaatcatattcgatggccccacgataatcatcaatcaggccgtggagccaaactattcccccagggaggcacccttaccgtcaggcttgtattccatccactgacggaaaatctcggccacacgaaccataggaagcccctccagggcctccaccgcttcagccggggcggcagcctccaacatggaaaacatcacctcaacctgggcgaaatccgcagactcccccgactgggcaattttagctgcacgacggaaaacgcgggcaggaacagcctgcgccgtctcctccgcatccgccaacacccagctacggtcaccgatctttaatgtgtaacctgtgtcactcatctatcaacaatcccctaaaatcgtgtatcagttcccggacggcggattaggatccggctcaggcttaggcggtgtaggaggctccggcttcggagaaggaggagtatcagcttttaaagccgtcatccacccccgaccagacaccgcattaccagtcttattaatctgggcagggtaagccttcaacgtcacaccatacccgtacacttcgccattcttacccttaatctcgtcacgatcgataagctcaacctcagggaaatagtagcgaataacctgatccccatcaacaatatccatcagtaaagcgtgcacgccagtggtggcaccaggagaaatatcgaacgaacccgaatcggctccggcagtaaccttcgactgccaaaacagctcgataacctccttcttagactcgatcagctggaaagaaatctcgatagaagactcggtagccaccgtgcgaacaacatccgcattctgccaagccttcaaatcatccgttttacgctcaggcttaatcttaaacccgtcatcagacaggtaccctaaagcggtaagcccggaaggaaccgcctccacacccttaatagtatcacccgcgtgcgcgtcaccaatataaacgtcgccagtaaccgctgaacgaacattagacgctttacgtgttgcagccatcacaacccccattaaatatcaaacaattacattaaaacaaaaacaaatacgtttactcagattcgacaggcctacacaccagcccgaacagcgaatacacatcaaaacgtgcaccatcaaccagcaaatcaggacccgtagaacgcctacaaaacaccaccggatcaccatcaaccccgtcagccagcacagcctcaacacgacgcgccaaagacatagcccgatcaggcgtatccgaaaacacgttcacccgcaaaaacacctgctcgcgaacatgcaactgtgggccaccatccaacgccaaccaaatcaggtcaccctcaaaactatccggcactgtcccggtgcatggtatatcagacagccagccatcatcattgagcacgcgtttagcccatttcctggggtcatcgtacacgatcacgacgccgccccaatcgaacgagccagcgtgccatgcttcgcctcaatacgcttcccacccttatatgtggtgcctatacgagcgacagcctcaacacggtgaacctgcacctccgacgacaaaccattacggtattgggccttatcgaaagcgttaccgcccacattcgccgaggccgcacgcttgacacgctcgccacgctcagccaacatgccctgcaccccagaagacttcaacacctcacgaatacccggcaaattcagcttcacattcacatcctgagccacaacctatcagcccttcttacgcttcaccttaacctgcgtaccagcatcccagccagacatcggatgatgccacaccataggagacccgtcagcctcccacacaacaccccgaatacgccacctacaacgataatcagcacccacaacaggctgcttgaacagcatcgaccaatactcatagtcagagtcacggcctgcagcctcatcctcctgcgaaacggaagcatagatggccacattatggtacacagtctcgacaggcttagaccagtcttccaccttgtcgccaagatcatcgacacgaacagtcggttgaagcatcacaaccgtttcaccataaggaaaactggtcatatcatatctcccacaaagggcccgcgtagccgttaatattcgacccgcacgagcaaccctcaccccacaccgtggaacacacctcagaatgattcacactactcctcatggtcggtgtaatagtgaacgctttaccagccccaccactatcctcacacaatttctttaatgcagcaatctcagaaggccacaacaaattcgtgggagtattagaccgtgtagtctgggcgaaaggacccgcagactcatactgcacctgacccgacacgccagtatcattccagcgcagcaaagccctgcgcaggatagctttagccgcatccttgtatttgaaatccggtttagcgatacagggggcgacactgacagccacagcctccacgtcggcgatcatcgcctcaagcttctctttaggaatatcggcgaaaggctcaatatcctcaggcttcaaaatgatacccatcaacaccaccccctgcacatagtacacattcgcttatcttgtatcagttaccagccggaggaggagtcggtgcagccttctccttcacaacagcaaacgaatcaagcgactcgatagccacatacagcacagcctcggcacgaaccataacctcattatggcccttcaaatcgcggccagtctgatccgggtcaccatactcgatcagctcgatcgggaagttacgctggaaaccccaatgaacacgagaaaaatcaccaacaatagccttaacaccagaggcaggcgacatctccggggcacccgaaacagtcgaagaagcaccaacattcagcccacgccaattatccaaaccagcaaacccggcagcaggatacatcggctgaccggcaagcggagaccccttaggatacacctcagtagacagagcaaacgagaacgccggatccaaagcaaccccgttaggaacctgcaaaccagcacccgcaatcaggccgacagccttaacaagatcggtcgtagcggaatcggtggcatcaacaacatgcttcgtcttatccagcgacaccttgacagccgcggcaggcttacccgtagcaggatcaataccgtggaaagcaatcaaatccacggcgcgaccaatcgaagcacccagagccggggaaatcagatcctggagcacacccagacggtagtcggcgtcagcccacataaactcgtcgcttacacgctgctgagtcacaaccttgataggctgcgcagtaaacgccgaaacaccaaccgaagctgaaggcttaacctcgccctcaccaacaatcttggcgcgaggaacaccactaaacacggcacccttcaccgggccgaaaatagtcggctgctccggcgacagcttcgccaaaacaccagaatcgatagcacggtcacgcaccgcaccaatcatagaaccaggaagctcaagcttccctgcagaaagaaaatcgtcagccatcagaaatcatctcctagaattattgacaagagcatccacaaacgcgacaccctcacgtcgtttaacatcatcaacgggggcactccccgcaagacggcgcacacccgcgccaccactactatggtcgatcaaacccttcaaagccttagcagactccaccagtgcttcacggtcgctaccgtgcaagaaagccacagcatcacccgacaggccacactcggcagccacctcacgcttcacaccctcaagaacaaacccgttaatccggtcttcgagttcctcattcttgcggcgaagatcatcaatcacagaccccgcatcaccatccgaggcgcgaagcttctccaactcggcgaaattacttttagcacgagactcccacttacgggcctcagccttccaatccgtgccagaagaagactcctccttcacggaaacatcaccggcatgatcatcgccggcagcctgcccatccttcacaacatcaacaatgtctccaccctttccgggctcaacagcatcattgtcaacattctgttcctcaacactctgatcggccatagcctaacctacactccttgcggaaaacaacacaacattgttgacccccgtgcgggagacaaccctgtgcaccgataaccggcggcacacaaccggaaaccatcatctcatgtcgccaacaatacgcatagccttcaaaatattgccaggcgactgctgcaacccatgatcatcaacccactcacgagccttctcataaacccgctgatatgcggcatccgcggcattcggctcccaaggcccaacaacctcaaccaccgtacacccacaatgatcatgatacttcgaaccaaacggacgcttaccggcacgcttatgacgccgagtatgaccagtagtaagcgccctctccttagtcgtataatccgacctcgtagccaacatggcacaaaacgcgcacggatcaccatcagtcaccctgcgccacgacctaccctgcgcacccgcagaccactcaaccgtgtcacggccagcattcatgacagcccgattaacacccgccgccatagcatcaatcgtgccattcgccctatccgggtcaccattcatcatcttcatagtcgaaaacgacctagccaacgcggcggcagcatcaaactcgtcatacacgatcaaaccaggatcgacaccgttaagcttccgaaaatcggacacgaacttgcccgccatagctgctgaaccatcatggccggcacgctccaactccacacacaaacgcacatactgcgcatctgtcatcttcccggaatgccacaaacgacccaactcggcataatagcccgcatacttcccggcaaaacggaccgcctcacgctgatacccggcagcagccatccgcgacgcaacacccgaagccatcgcctatcaaacctcgctagtctgccgcgatatagcgccagcaagcgccgccaacggatcagacgactcggcacgatgccgcatcacagcctcaacctgcacatcatcaagccccaacatttccaacaccgtacggctatcggccggcaaaataccggcacccacaagcttcgtcacagcatcagccgtagcagcccgagtcggcgttgacgcatcacgccacctcaaacccacatcaccgaaaaacgcggcctcatcaacactcgaatcaagcgccctcgcagccagaaaaccaaccgacaaccagccctgaccaaacgacgtctgcctgcgctcggcacgcttcacaagcctcgactcctcagcagccaaagcctcacccgacggtgggttagacgtgataaacccgaaatagcgctccggaaccgcagcctcacccgccgtcaactgggctaatagcctcatctgatccgaatacggtgtaggagaattcacaggaaacgaccccacattcggggtatcaccatcgtcatccttatcaacagcccacacagaagccatcgacaggacccagccaggctgcgaaaactcgtcagccgacacaccagtcacccaacgttgaggatacgcatagaagtcacgattcacagactgccccaacagtgtgcgaacagcctcatccgtgtaagcacgaatagacctcgtaatctccgaacggccatcaatcctagacgtgcgacgacgattcacgataggcaccaacggaaccgcaccaagactattctcgatacggccaacctcgacccactcacggctccctcgccgctcaacctgaacaatcacatcaggcaacaacaactcagcctcaacaacctcaggatcacacgtctgctgcaccaccaaacccgcatccagacgagaaccatcggcagaaaactttccggtgcaattcttcggtgactgcggacgaacagaaacagtgccatcctcttgggggataacagccacaaacgacaacccaaaaattagtgcatcaaggtggacgtcacacgacgccgtagccagccgattcgcagcatacacaccatccaggccgtagccgtcaccattcgtccagccaagccaatccagacgctcctccaaagcatccaccgcaatcccaggccacgacaccacagtctgcacacgctgcaactccggcggaatagccacaccaaggtcacgcacccgggcagagccctcatagtagccctcaatacggcaatgccacgaagacaacctttgaatacgatcgtacatgccctcaatcagagccaactcatccgagttcataccacagacacccgcttcctaccactacgctcccgacggccacgacgaacacgcttagcccccaaaaacgccaaagacacagcctccaaaggaacctcagaaccatccttaaacgaggaaccccaaccccacgcagaacccttcttcttctgcacagccgacctcacagcaatatccaacatgtcacgcctcgaatcagccctagggtgagaaaccacacccgacctcacaccctccaagaaggcttgacacgcctccacatacaccccagtatcagccacaatcacgccacggcccggaacaccacgatccgtcaacgccttctgcaacaacacagcaccagacccggcaaccatgatccggtcagtatcaccccaacgaaccgccaaccagtcagccaaccggcccacaccatcaacaatcgtccccgaaagcccatcaatcacctcaacatgaaccccagcatcagtcctgccagcacccgccaacgcgacacgatccccagaacgagaaaacgagacaccaaacactttcccgcccacaagctccacatcatcgacagccgactgaacccacttatccgccggaatcaccgacgaagcagactggccacgatcccaccagccaagccgctcccgagcaaacccggcagcagacatcgactcatgctcatccgagactgtcccaaaattcagacgacgccccaacgccggattcgtatccccagccaacttccgccactgccgcgacacatcatccggatccgactcgtcaggaatcgaaaactccgtccacgcaaaccgtttaccacccgacaaagcctgcccacgaagacgcaacaccacgctaccatccgccaacggcccaggcggcgtacccaaaaaaatctgctgcggatcaccagacggagccgcagacaccgtaggaagcaacgcctccaactgctcatccgacaactcctgagcctcatcacacaccaaatcatcaaccgtaaacccgcgagcagaaccccgagaacgggccacaaactcaaccgacccccaacccggacagccacacttcttaccacccacacgacaatcaggatgatgcaacacaatcgactcctgaccattcgtcgcacgaacagccttcaccatacgagccaaatccggatagcgccgctcattctcaaaaaacgacctcaaccgcataaacgccttacgagccgacttcaactcgtgagccgtatgcaaaacacgccgcccctgaaccaccatcttaaaaagctcaacaacctcaaggatagcgttcttcccattctggcgaggaacaaacaccccacacacacccgcagcaagcctgccattaccacccacagcaagccaatcatccaacacctgctgctgccacggatccggagtcaacccatacgcagcccccaaagcaccagcatccttgccggcagacaccgaatacgccgcagccacacgatgacgaggaacctgagaacccacaacaccagacattaggcccctttacgcttccgataccgatcaatcatcgccaccgcagaaccagcaccacggccaccagacgccacatcaaccgaataccgatccaacatacccataaaagccttcacatgagcacgaagcgaagccaccaaatccgcgcgaccctcacgccacacacaatcatgaatcaccgcagcatccatgagaaacagccactcctcatcagacacgtactgcgcacgactatcctcaccccacacacgccaccaacgacgcgtctccccacaccactcacgactatcaggaagctcaggctgcacaacactcaccaccaacacaaaaagtcgacaaacaaacaaatccacaaaagggaggtatttcactagatcggaagagc

SEQ ID NO: 12 - DNA, 29724 bp, Propionibacterium acnes bacteriophage
aaacctacctgggcgaagaacaagccttcaaactcgccaccgtgcgcaccaaaaacgggttcaacgcggtcgtgctcaaacccctcgacgacgccatctacgataaggttgccgaatacgtagacaagcgcgataacggccagctagacgacaccacagcccctgctgatgccgacatagatatcgactccatctgaccaacaaaacacacccaaccaacagatagattaaggctccgatgctctctctccaaagatccttcgagagggcctcccaaaccgctgccgagctgcctcgcataccccagctagaacccctctaccgcaaccaggacatgcacatccacaaaggggacctagtcatgatcgcggggcggtccggcagccaaaaatcagggctagcaatgttcatcaccgcgatgctcaaccagccagccctctacatatcaggggacatgacaccctgggaggcctccacacgaatcatctccctcaacacacaacacaccaccacacagatacaacacaacatcgacgactacgggccagaatactatcgagacagcatccaccacggcgcgcacatcacattctcattccagtcacccatcacctggacagacatcaccatggaattacaagcctacatggaaatgtggaacaccttcccaccactcatcgtcatcgacaacctgatggacatccaagactgcgagagtgactaccaggcacagcaagaagccatgcaatggatcacagcattaggtagggatactagctccaccattattgtcacacaccatgccaccgacaaaaccggaaccgacatcgaacacccgccagcacggcgagaaatcaaaaacggcctctccgaaaaaccacaactcatattgggagtctccctgtatggtggcgaagacaacggcaacggactcacgatacccgccgaggcacgcatcgcagtgttgaaacagcgcacaggcaaatcaagcccagacggaacaaaatatgagcggctcagagcctaccccgaatacacattcttcgggcccctggtcgaaaaacagccctggaacatgacacaagaacataaaggactatgatggctacacagcaggcacgcaaccgccgggccggcgcagaatgggaaacacgactcctacaccaactacgcgacaccggccacgatatcgaacgcctccacctcaacggccgcgaagacgaaggcgacctcatcctcacaaccggccacaaaacctatgtgatcgaagcgaaagcaggacagccccacctcgccgaattcgtgaaacaagccagccgagaagcacgcaactacgaaacacaccgaaaccgcgaaaaccagtccaccatcggactcgtcatcatgaaacagcgcaacaaaccctggagcgaagcctatgtggtatcaaccctcaacgagctcctcccacacctctgacacctgccgcctcctcgacgcccaccagatacgctacaacccgtcacggaacgagcaacacatcctctgcccgttccacgacgaccaccagccctccatgagcatcaacctcgacaagggcctctggtactgccacacatgcggtatcggaggaggcctcgccaaactgaaacaacaactcgaagaaagaaacccgaatgtacgacagcatacgcccctacaacattgcggaacgccgccgaatccagaaagcctcagccctctacgaaacccacctcgaaaacatactcgacctgctctcagcaagaggcatcagcgaagaaacagcccgctaccaccaccttggatacatcgacaatgaccccatcccaggccacgaaaactacaaccagtgcatcaccatcccatacatgtaccccgtctggggacagccagccgaaatacgaaaaatgcgtttccgctgctcactcccgcatgattgcaaaacccacaaccaccccaaatatctaaccccagccggggacacaggctccatctacaacatggccgccatggccaacccggcagccgaaatacacatttgcgaaggcgaattcgactccatgatcctcgaacaatgcggatggccggccgtagcactacccggcgcaacctcgtggcaaaacttttggaccaaattcttcgaaggctacgaccacatctacatctggtcagacccagacccggcaggcgaccatatggcccaaaccctaacccaagcactaccgcaagccacccatgtgcccctcactgtcggggatgtcacagacacctacctgcaggccggcaagacagggttgacacaagcactagacacagtgctacaataaaaccacacaagcaacccaaaccaagaaaggtacactaaaacatcatggatcccctcgacacgtgccccatccccgaccggcgcaacaccagccaagccgccaggaggcgtatccgcctcgccatctgtgcagaaaaatgggccgacggcgtggacccactccacatcatgcacacctggggcaccacctatgatgggatgcgatccatgatccgcgccaaccccgacattaaactacccgacgacatggccaaacgtttgcacaaggtatgtcgggaagcctaccccaaaaaccagcccaacaggcaccgaagcggatgggacgcctacgagaaaaactactacacccacgaaatcctcttcctcaaccaattcaacatcccagccctcgaaatcctcaaccggctcgacgtgtcatgggccatgtggaaacaaatcatcaccgaaaaccatctcacccggctacaagacgaaacctacaatgcgtgccactggcactatctgaaacagcaacacccagactggaccgaccaacaaataacacaagcccaacacgccgggaacaacaccttcaaccagttcatgcaagacgaccagccggtactatcgtgagcatctcgttcaaacccaccacaaaagacaaacgcgccatacacaacatcattgtcgaagaatggcttaacgaaaaccaagcacaagacattcccgatagtgtactacaacacattatcgaatactgctggcagcgcttcaccgacaacaacaggtacgctgtcgcggcacaatactggaaagggccacaccagccagacaacaaccaccagcgaatcattgtaggctatttcaaaaccgccaaacaggcagaaaacgcggccaaacaattccactggaacacccggatgcaacaacaatggaaaacatggatactcccagtccacaacggcaccgtgtcagagcatttcaccaaccaaaaaaccctgctagacgagcaagacaataacaacaccgaccagctgccggagcatctccaaaacgtcatgtgcggtaaaacactccaccacacagacggaacaacatcgtggtgcacacgcaaaccaggacacgacggcgactgccgcacaggatggcagcccaccacacaaccgataggacatcatggcaaccaaaactgaaaccctgatacagcgctacggccgcaaagccgccgacgtgctcgccgacaaaaccatccccgcctcatggctagcacaacaactcacccaagccggataccccatctccgccaccgtaattaaagactaccgccgcaaacaagccaacaccaccccacacgaggaagaggaaaaccagtgatagacaacatagaccggctactcacacagctagccaaccacgacaacgccatcgacaccatcgacgacaatctagccaacggtaccgtgcgccgcacacgcatctccgaatggaccctacccaacggagaaacaggccgatccatacaaaaaatcatcgaccaccaacccgcaacaaacccctacccggtcgacgaactcgtcaataaactagccgaatggacacccccaaaacccgaacaggacacccacaccgactacagcaatgttgcgttcgtggtaggggcgggagacttccaaatcggcaaaggcatccccggcggagaaacatcacacttcgcagacgactacctacactccctcacatcagctaaacactactggcaacaagcaggcaaacccgagcgagtccacatcgcattcctcggcgacatgatcgaaggatacgtgtcacaaggcggcaacaacgcctggcgcacacaaacccccttgacggaacaaatcaggctcacccgcatggccatgatgcaactcatccacatgttcgaccactgcaaaaacgtcaccatcacatccatccccggcaaccatggagaagccgtacgcttcggcaaaggagtcaccacctacgacgactccttcgatgtagactgctgccgcgtcatcgccgaagcgtaccaactcaccaaccaataccccaacctacacttccacttcccccagcgggacgaaatgaccaccaccgttgatgtggcaggcacacggatactgcacgcccacggacaccaatggcgcaccggcaaacactatgattggtggcgcggccaagaattccacaacggcaccacatcccatattctcatggccgggcaccggcaccacctagaaatctccgagcaaggacaacgcaccttcatccaatgcccatccatggaaggcgaatccacatggttccggcacaagacgggcaccaccggaaaccccggactcgtgtgctacactatcaacaacaaaacaccaaacaactaccagatagcaaggtaatagtgccatgagtagacgaccaaccaaagcagacctagccaccaccgcatcgtgggtgtgggccacagaccatcatctacgcacactcaaccgggcatgcaccaaaacagccggacactaccccgcaatcagcgcagacgacctgtaccaagactccctactatatattgcggtgcgggaacaataccacaacctagacaacaaacactacaccaaaatgtgttacagggtagccaaacggctagccaacaaaaccacacaacacctagaccagccgaaacccttacccgatattattcatctagccgacaaccaaaccagcaactaaaaggagaacccctcatggttaccaccatcctcgacgacggaacccaaaccaccaagctacaaacagtaggcaccaccaccaccgccatcatcaccaacacagaaaaccccgaaaccatcaccgccaaatacaccatcagcaaagacggcacagccacctacagcataagcggaaacacctatttgggagaccaccaacacatcatcaaactcatgtacgactactgccactgcgtcggacgattcgacaccaccaacaccagcaacaccaacgacctgttcaaggggtgaccaagtgaaccaaacctacaccaccgccgacatcatccaagccgcacaatggatctggaacggcggcccatggaaaccatcagtagaaccgggaatgccccccccaccaaccgcgccacaacaccacggcaacaacatcgtcaccatgatcgatctacagctagccatcgacgactacaccctcacctgtgaaccctccaaacagcgaaaacatttagcacggctggcagcattccgggaagtctacgggtacgaccaaacatatgccacagccgcccaacgactcggagtcacccggcaaaccgtgaaacagtgggcagaccaaacactgatgacgttaaccgaatacgcaaacagcacatactacatgccagacgataacgaaggaatggcataaaaaccatggacaacacacacaacatcacctacaccaccctcaacacagcgatacaccgcatcgtccaacaacagcccaccaacatgcaacagctacaaaacattgttgacagtgtcgaaaaccagtacggtgtacccatctccctcgacaacgtgaaccttaccgtcaacgacgtcaacctcgacgatctagccatcgaccaggacacgctagacgagtgcagcgaaatcctgtggctatgcgacagtgcaggacaccccacaaacaacagcaacacccgtggcaacagcgaggaccagagcccccatacaagccaggaagcactagactggctcgccggaatcgcataccaggccaaactattacaggcggcagccgacgagatcatgtgggctatcatccgccaccgcgacaaccacaaaaacgttatcggccggaacgttctagaccaggccaacgatactatctccgcctgcctccacctgcaccagatactcgaagacaccatcgacaacaacgaatcatagctataccgcataaacagaaatagtgccccagcagcaaccaccacacgatcgtggcagcaccgctggggcacacacacatattcacctgtcacacaacagtggcagactccacaacgccaacctcagactcggctgcacgcttcggctcatagccggcaagatcagcatcgtctacaggctcgatcatgccaggatccgacacatcaaccatgtgcggctcaaccatgcccccatcgtcgggtggaacaagcccagcatccacaaccgtggttttaggtttgccggccacaaacgctgggctaccaaacgaggtagcaaccgacagcaccgcagcaaccgtggccgtaatcagggcagactcccacggcaaaccgcgaaacgactccgccgtatacgtgacacccgccgtcaccccaagcacagcaacaaacgtttgaataaaagttttcagggcacgctccagcaggcccaaccaaaactgtttacccacaacaaaccaccatcactttttcacatcgttgacagcagactcaagcctgtcaagacggctacgacactccaacacgtaataccagacactccacaaagcatccttagtacgccacagcttccccgtcaccggattcttcacccacgacagggcatcaacacgcttacccaagtcaccattctgtacctgtaccacaccaacatcgtgatgcagctggttcaccgactgggccacctgtgccgacaactgtttaatctgatcatgtaacgctttcacatcagccatacttaactcctcactaccactaccgccgttgacaacggccataaacctgtcccacggaaaccacggccccggatcatcgtgatccgactgatgccacgcatccgtaacatccacatgcccgcagataccccgtttgccggcttttagatcggccacagacagtttcctcttcggaacaccatgcttgtcacacaaccgccggcacaggacagccgccttctcaactgcaggccacacgcgaggatccagccactgttcacgagtgtaagcgtgccccggtacacggaatgaggcgtgcgaacccccatccgcgcaaatctcgatacccaaactatgcggattcggcggggcatgccacccaatcgtagactccgacaagcactgcaccgtctccccaacatcacacacatagtgtgcagaacccccagacgatggggaagcgaaatagtttgccgtggacacagcccgacctttacgggaggcggacggaaaccccacatccgggcatgttgcatgaatcacaacccggttcaccggactattcgaaccggcagagtgatgcgctgcaggaatgtatttcaccacacaccaccaccaaacacaatcaacatcagtaacacctttccactatcattcatttgcgggatgatacggtaaccacagttgacggtttcacactctcgcaggccaccgaacccgctatggtagaagccgcaccgtcactatatttcacaaccaggcggcccccggaacagtacacagacaccaccgagcggccatccttaccatctttaccatcggatccgttcgcaccggcggggccacgctcaccccgttccccctgtgcaccctgcggaccggcaggacctgaagggcccacatcaccgcgctcaccggccgaaccgtcaacgccgttcacaccgttagcaccagcagggcccggaacaccatcatggccatccgatccattcgcaccaggtaacccgtcaggacccttcacaccattcaaacccggagaaccctgcggaccaacagggccaaccagcccagcagaaccattaacaccatcccggccatcaacaccagcgggcccttgcgggccgcgcacaccagccgggccaggaacaccctgcacactccgctccgtgcgcatcgcatccacacacaaaccagacctgtgcagcttcacagactccacgccaccctgggtacacacctgcttcacacgggcagccaaacccctggcagccgtaccattcgactgggccctcgcctgctccgaatcccgctcagaggatacagccccgaaacgcaaagcacccgcagcaaccacagccagtagtacaagcgacaaaaacagcaacaccagtgaaaacttctcaaaattgcggcgctgccgcttctcctcctccaactccctcaaccctactcacctccaccatcaacagtatccttcaaaaactcaggcaaatcaggaagatgcataggctccacctcgtcaggaagcccggcgttaaaccttcgcacctcacgccgcacaccccacgtatactcttccatcgcatccacctgcgcagacagcctgcgcaaacgctttctcgatctagatgtgaccgcctgaacagaacccaaaaccgtggctaacgcggtacaaatagaggccaccagtgcaggagtaaaccacgacaccacagccccccaacatcacaccatccgccacaacaacagcccggtcacacgccgacagcaatccagttagctattgcaggcacaccattcggcttagaaccatcattcgtaataaacgccaaattaaaatccttggcagtcacattgtaggctttcacatcaatctgtgccgtgcccccagccgccgtagccatagacgccaccacgataggcggactagcaaactggcgatcaaacgggatcgtgtaagcatacacagcagaaccaccaaacatgatcgacttagaacccgtctcaatccgtggggacaacaacatccactcgccggcatggttagcccacacagcccccgaaggaaccatcacacggtcaccctccacaggggtcgggtcacacgcagcagactccccaaacgccacacgggcagctatagccctcctgtcaagctgctgctgcaacccgttagacgacaccaccaaagtcgccaacagttgctgatggaacacgccaggctcggcacgcaacacatccctggcacgctccgcacgccccccgggaacaatctccaacttggccgtattctgctcccaatcccgagacagaacaacatagtcgtatctcgtctcacccgggccaggcagctgccctgtcaccgtctcaacactattcgacgtgcacatcaccccgtgagcccacgcctgccccggcaggacctcacacaacactgtggcaccctgaatcgtcgtgtcgacacgaaaatcgtccgggcccttcacagacggcatattacccatcagaccagacatttgagcccaatcatactcggtcaacacaccatcaaaccctttacacacaatacccacaacaaacccccaattcttttctagaatttttgcaaatcccgcacacccgcagccaaaccagccacacgccgcgctagcaacgccgacggattatcctcataatcccccgcaaccggtatcaccttcgtccaaccatcaccaggcgaatcacactccacatcaatctgccgcacaatctccgcaatagggccagaacccacatccacatagataagatcacccggcatcagattgccgggcccaaaccgcaacacatccgactcagccaactcgatcttaaaccccgacgaagcccccaaatcccccaacacctgctcagcctcatcaatgagatgcacatgttcagaatccgtgttacgggcatccttaaacacctctacacgatcaaaccaatcctcctcggccatcgaatcaacgtcctcacaaaacagccgatctttgccctcgccgcggccaccaaccaccaccgaagtagccttcggggcgtcacgcacatactcccacgacacaatcgaaccagactcggcagtcaacacatgcttccgggtcacagcaggcacacaatcaaacaccaaaccacgctgatcaaacttagcattctcaaactggttcaccgtgacagtcatccgagcccacgacaacaccggcaacaacttatcggcaaacacgtgaaaccgggcctgaaaatccttaatatagcggccgcgactctcatcatcgttcataaacaaaccaggcggaaaacgccaagcattatcccccaacacctgcttagccaccgactcagccgcacccgaatagtgggcataatccctgtcggcacgccactccgaacccaccaaaccgggacgataattcacaggccacatcagcatacgccacaacaggcggatatcatcctcacacgtgatagtcacatgggaagaacgccacggacccacaccatgcaccttacgcacaggcccagaaaaaatctggccaccaccataatcaacaaccagccgtgcaccaggcttcgtcaacccgtcaagcctagaatgatcacccgacaccaccaactccagcgtcgacaaaccattccacttcaacgacaacttcaacgactcaaaaaaattgataggcgccacacggcgataatcaggtgtaaacaatgttatctgcggaacaagaccagccatcaactattcaccaagccctcaaaaacctgtactgcaccgacacaacaatggcacccaaaccaaccatctcaatattcacactcttagaaccacccggcggaatcggcgcaaactcccactccgtcaaacgatccatcacatcctcaaacccgttcaacaacgcagactgctgccgaggatccgtgtcaatagtgatccaatcatactcctccaccggccaatccgaagacacacgcaaaccatcaatctgcacagaccacgactccaacgggccctccacacgaatcacaggccacgcaggcacatcacccttattagacaggttatcccagcccaaaccaacaccaggcgtcaacaccacaggaaacgccgtgccatccttgccgacagggccgccacccaaccaatcctgcaacttcgcattactaaaacgaaacttttgctcatccccataccaaaacgggtcataggctgtcaaatgaatcacatagcgcgcatagccacgattcaccggatcaaccgtaaacgtgtcatccaccgaatcaaaccggcattttagcacacgctctttgccggcaggagtcttcaccgacaactcccccacctcgcccgggggaaacgcagaccacaactcgtcataggctttcaaaaaaccgtcacgaaacccgccatccggatccgggtcaacacccgacaccaacaccggcagcgtcacctcgcgaggcttcacattaaacccgcgccactccgaaccatgcacaccaacatgagtttgagaaaaatgctcaacctcgggaacacccaaaccgcgcaacgaatcattcaacaacatcaccggagacgcacccgtataatccgtcaaatgaagcacacgctccggagaattaccaatcaacggcaacatagaccaagtaacagtcaaaccggcacgatcagacgggtcaggaataaacatgaaccacacccccaatcacacgtaagccaacgcgttcaaagcgtcacgctgctgccgctcaatccgcttcgcaaactcgttcggatcaccataagtaggcccattcacattcaccacaacactcttatcattcgcacgctgatacctgccatacggggtaaacgagcccacagacgatcgcacaccaaaccgggcatccacagcatcaggcagccgaccagccacacccgacatcgcatccaacgccaaaccagcattcccggtgatcccatcagccaaaccggcaacaacctgccggccaacctcgtcacgaaacaccctagacggagaatgaatacccaacaccgacttcgccgcactcgcaacctgagaacccatattacgcaccgtatccagcaggccactcatagcattccggataccattacccaaaccagacaccacatcacggccagcagacaccaacaaggaccccatattaccgagagcacgccgaatattgccaggcaaattccggaaaaaccctagcacaccatgcacgccgctagacacggcagaccccatagcatgcatagcactagaagccgcactcctggccccattaaacccgcgcacagcaccactacgaacccgagaagccatcgaactgaaaaacccgccaacagcagacgccaccgaagacacaacaccccggatagcattcatcgcagaagaaacagcaccacgggccgcgttaaaaccagacctcgcatgggaggcaaccgaagaacccagccgggcaaaaaaccccacaaccgcgttcacaccggcagaaataaccgacttgaaaccgttaataaacgctgacgtaaacgctctaatatgattccagccattcaagatggccgtgcccatagacctcacgccagacactaaatgattcacaacccatgaaatgacacgagtgacagtcccaataatgcgggctgcagcagacacaatagcgccaagaatacgtgcaacaaacccgatcacagctgtcacaatcggcatcacaaccggaataatgcgggcaaccacctgcaacacaaccgaaacaacctgcaccaccacacgcataacagacatgatgactggtatcaacgaccggatcaggccgataatcggcggcagaacagacatgacagcacccaaaatctgttgaatcacaggcatcaaaacaggcaccaactgcatgattacgccaacaacctgccgtatcacagcaacaacagcctgcaacaccggcatcaacgccggcaacaacatggcagcaacctgtgtcaccgcaccaataatctgcgtaatcacaggaaccagacgggccaccaacataccaatcacaggcatcaactgcgccgctagcccggcaaccataccaataatctggccgaacactggcgccaacctggcaaccagccccgcaacaatcccgaacacaggctgcaaggcggccatgatctgccccaaagcctggccaacaacccccacaagctgcatcaccgcggcacggaactgggcgttagtggcaaacatggcagcaaacagcccgatcacaatcccgacagggccacccaaggcgcgaaacacgccgccaagccccccggcggcacccttcaaagcaccaaacgacggcaacagattcttcaacgacaccgccaacggggcaaaccccgcgacaagcttccccacaccggcagcaacaacaccaaacactgcggtgccgccagcaaacatggcagccaaattcaccttagggacaggcaaatgcagcctcgcaaaaatgcccttcaactgctccgccttggcgcgcatctgtgcattcattcttgtgatcatgcccggcatccggttaatccacgccaaaatagacggcatcatccgctgaataccctgatccaccgacgcaaacaggggcttcacagaatccgtcaccgacttgatcaccggattcaacgcaacaaaaatctgccgcagaccgttaagaaacggggccatagccgtagcaccaagatagcccagggcgcccttaacattcttcatagcgccctcaaacgtcttaccagacgcctgcgcagcaccacccatgccaagcttcatcgcagcagcaaacgtgttaaaatcaatctgccccttcgacaccatctgcgacacctcagcagacgttttacccgtctgcctggcaagcaaagacagtacaggaacacccgccatcgtaagctgcagcatgtcatcgccctgcaacttaccgcgagccatcacagacgtaaaaatagcgcccgtatcctgaaacgacttacccgaaatataagacacatcggcgacagtcttcaacacatccgtcatctgcccgccagacttcacacccgaagcagacaacgccgcagccgtagacgccgcatcccccaacgcatacgacgtaccagtcacagcctcaatagccgaattcataatcgaagacgtgtcagacgacgtgtgacccaaaccagtcagtttagcctgagcctcatcgatagccatagcgcgagcaataccgccaccaatagtcacatcatagatagacttgaggcccctcttagcaacattgatagcgcccaccattgcggcaccaccaagcgccaacttcatacccttagcaaacaagctacccgaacgctgaccctcagcaggcatcacacccgacaactgtttaccaacatcacttttaaggccgggcatcttcgtatacaacgacacatatgcggaagcaatctcaccagacatacactattcaccccataatattaatctcgcgagacaccccgccaccggcacgcacacgcgccaaaatatcgtccacctgcccagacgtaaaccgggccctacgctcatccgtaggcctcgccacaggctccggctgcccctcactattagcagacctgtaatgatccaacatgtccaacaccgcccactcgcaccactcaaacgggcgctgccaaccattcaggtgggccgccaactggctagacgtgtcagtacacaacacgccagccagccggacagcctcaccccaacacattatcgggccaccaacatcataaaccgagcaaccgaaccgggtcctccaatcatattcgatggccccacgataatcatcaatcaggccgtggagccaaattattcccccagcgaggcacccttaccgtcaggcttatattccatccactggcggaaaatctcggccacacgaaccataggaagcccctccaaggcctccacagcatcctctggggcggcagcctccaacatggaaaacatcacctcaacctgggcgaaatccgcagactcccccgactgggcaatcttagcggcacgacggaaaacgcgggcaggaacagcctgagccgtctcctccgcatccgccaacacccagctacggtcaccaatctttaacgtgtaacctgtgtcactcatctatcaacaatccctaaaatcgtgtatcagttctcggacggcggattcggatccggctgaggcttcggagaaggaggagtatcagcttttaaagccgtcatccacccccgaccagacaccgcattaccagtcttattaatctgggcagggtaagccttcaacgtcacaccatacccgtacacttcgccattcttgcccttgatctcgtcacgatcgataagctcaacctcagggaaatagtagcgaataacctgatcaccatcaacaatatccatcagtaaagcgtgcacgccagtggtggcacctggtgaaatatcgaacgaacccgaatcggatccggcagtaaccttcgactgccaaaacagctcgataacctctttcttggattcgatcagctggaaagaaatctcgatagacgactctgtagccacagtgcgaacaacatccgcattctgccaagccttcaaatcatccgttttacgctcaggcttaatcttaaacccgtcatcagacagataccctaaagctgtaagcccggaaggaaccgcctccacaccctgaatagtatcacccgcgtgcgcggcaccaatataaacgtcgccagtaacagcagagcgaacattagacgctttacgtgttgcagccatcacaacccccattaaatatcaaacaattacattaaaacaaaaacaataagcttattcagactccgcaggcctacatatcagctcaaacagcgaatacacatcaaaacgtgcaccatcaaccaaaagatcagggccagtagaccgtcgacagtacaccaccgggtcaccatccacaccgtctacaagcacagcctccacccgcctggctagcgacatagcacgatccggagtatccgagaaaacattcacccgcaaaaacacctgctcacgaacatgcaactgcgggccaccatccaacgccaaccaaatcaagtcaccgctgaaatcatcgggcaccgtccccacacaaggtatatcggacagccagccatcatccgccaacacgcgtttagcccacttcctggggtcaccgtaaacgatcacgacgcagccccaatcgaccgggccagcgtgccatgcttcgcctcaatacgcttcccacccttataggtggtgccaatacgggccacagcctcaacacggtgaacctgcacctccgacgacaaaccattacggtattgagccttatcgaaagcgttaccgcccacattcgccgaggctgcacgcttgacacgctcgccacgctcagccaacatgccctgtaccccagaagacttcaacacttcacggatacccggcaagttcagcttcacattcacatcctgagccactacccatcagcccttcttacgcttcacattaacctgcgtgcccgcatcccagccagacatcgggtgatgccacaccataggagacccgtcagcctcccacaccacaccccgaatacgccaccggcaacgataatcagcgcccacaacaggctgcttgaacagcatcgaccaatgctcatagtcagagtcacgccccgcggcctcatcctcctgcgacacagaagcatatatggccacgttatggtacacagtctcgacaggcttagaccagtcttccaccttgtcgccaagatcatcgacacgaacagtcggttgaagcatcacaaccgtttcaccataaggaaaactggtcatatcatatctcccacaaagggccagcgtagccgttaatatcagatccgcacgagcaaccctcaccccacaccgtggaacacacctcagaatgattcacgctactcctcatggtcggtgtgatagtgaacgctttaccagccccaccatcaccctcacacaacttcttcaacgcagcaatctcagaaggccacaacaaattcgtgggagtattcgaccgtgtagtctgagcaaacgggcccgcagactcatactgcacctgacccgaaaccccggtatcattccagcgcagcaaagccctgcgcaggatcgccttagcggcatccctatatttgaaatccggtttagcgatacagggggcgacactgacagcaacagcctccacatcggcaatcatcgcctcaagcttctctctaggaatatcggcgaaaggctcaatatcctcaggcttcaaaatgatacccatcaacaccaccccctgcacacagtacacattcgcttatcttgtatcagttaccggccggcggattaggcttcggtgcagccttctccttcacaacagcaaacgaatcaagcgactcgatagccacatacagcacagcctcggcacgaaccataacctcattatggcccttcaaatcgcggccagtctgatccgggtcaccatactcgatcagttcgatcgggaagttacgctggaacccccaatgaacacgagagaaatcacccacaatagccttcacaccagaggcaggcgacatctccggggcacccgaaacagtcgaagaagcaccaacattcagcccacgccaattatccaaaccagcaaacccggcggcaggatacatcggctgaccggcaagcggagaccccttcggatacacctcagtagacagagcaaacgagaacgccggatccagggcgaccccgctaggaacctgcaaaccagcacccgcaatcaggccgacagccttaaccagatcagccgtagcgctatcggtggcatcaaccgtcttcgaagtcttatccagcgacaccttgacagccgcagcaggcttaccagtggcaggatcaataccgtggaaagcaatcagatccacggcgcgaccaatcgaagcacccagggcaggcgaaataagatcctgcaaaacacccagacggtaatcagcatcagcccacataaactcatccgagacacgctgctgagtcacaaccttgataggctgcgcagtaaacgccgaaacatcaacagacgcggaaggcttaacctcaccctcaccaacaatcttcgcgcgaggaacaccagaaaacacggcacccttcacagggccaaaaatagtcggctgctccggcgacagcttcgccaaaacaccagaatcgatagcacggtcacgaaccgcaccaatcatagaaccaggaagctcaagcttacctgcagaaagaaaatcgtcagccatcacaaatcatctcctagaattattgacaagagcatccacaaacgcgacaccctcacgtcgtttaacatcatcaacgggggcactccccgcaagacggcgcacacccgcgccaccaccactctggtcgatcaaacccttcaaagctttcgcagactcggcaagcgactccttatcgccacccgacaagaaagcgatcgcatcactggacaaaccatactctgaagccacctcgcgcttcacaccctcaagaacaaacccgttgatcctgtcttcgagttcctcattcttgcggcgaagctcatcaatagtagatccagaatcgtcactcgatgtacgaagcttctccaactcggcgaaattacttttagcacgagactcccacttacgggcctcagccttccaatccgtgccagaagaagactcctccttcacggaaacatcaccggcatgatcatcgccggcagcctgcccatccttcacaacatcaacaatgtctccaccctttccgggctcaacagcatcattgtcaacattctgttcttcaactttttgatcggccatagcctaacctatactccttgcggaaaacaacacaacattgttgacccccgtgcgggagacaaccctgtgcaccgataaccggcggcacacaaccggaaaccatcatctcatgtcgccaacagtacgcatagccttcaaaatattgccaggcgactgctgcaacccatgatcatcaacccactcacgagccttctcatacgtcctctgatatgcggcatcagccctattcggttcccaagggccaacaacctcaaccaccgtacaaccacaatgatcatgatacttcgaaccaaacggacgcctaccggcacgcttatgacgccgagtatgaccagtagtaagcgcccgctctttggtcgtataatccgacctcgtagccaacatggcacaaaacgcgcacggatcaccatcagtcaccctgcgccacgacctaccctgcgcacccgcagaccactcaaccgtgtcacggccagcattcatcacagcccgattaaaacccgccgccatcgcatcaatcgtgtcattcgccctatccgggtcactctcaagaatcttcatagtcgaaaacgacctagccaacgcggcggcagcatcaaactcgtcatacacaatcaaaccaggatccacaccgttaagcttccgaaaatcggacacaaacctggcagccaacgatgccgaaccatcatggccggcacgctccaactccacacacaaacgcacatactgcgcatctgtcatcttcccggcatgccacaaacgacccaactcggcataatagcccgcatacttcccagcaaacctgacagcctcacgctgatactcagtcgcagcaagcctcgacatagcacccgaagccatcgcctatcaaacctcgttagtttgacgagaaatagccccagccagcgccgccaacggatcagacgactcggcacgatgacgcatcacagcctcaacctgcacatcatcaagccccaacatctccaacaccgtccgagaatccgccggcaaaataccggcaccaacaagcttcgtcacagcatccgctgtagccgcccgagtcggcgtcgaagcatcacgccaacgcaaacccacatcaccgaaaaacgcggcctcatcaacactcgaatcaagcgccctggcagccaggaaaccaaccgacagccagccctgaccaaacgacgtctgcctccgctcggcacgcttcacaagccgagactcctccgcagccaacgcctcacccgaaggcgggttagacgtgataaacccgaaatagcgctccggaaccgcagcctcacccgcagtcaactgcgccaacaaacgcatctgatccgaatacggtgtaggcgaattcacaggaaacgaccccacattcggagtgtcaccatcatcatccttatcaacagcccacacagaagccatcgacaacacccagccaggctgcgaaaactcgtcagccgacacgcccgtaacccacctttgcgggtaggcatagaagtcacgattcacagactgccccaacagtgtgcgcacagcctcatccgtgtaagccctaatcgagcgggtaatctccgaacggccatcaatcctcgaagtacggcgacgattcacaacaggcaccaacggaaccgcacccaacacattcacgatacggcccgtctcaacccactcacgcgaaccccgccgctccacctgaacaatcacatcaggaagcaacaactccgcctcaacaacctccggatcacacgtctgctgcaccacaagaccagcatccaaacgagacccatcagccgaaaaccggcccgtacaattcttcggcgactgcggacgaaccaacaccgacccatcctcttggggaatgatcgccacaaacgacaacccaaaaatcagtgcatcaaggtgcacatcacacgacgccgtagcaagccgattcgcagcatacacaccatccaaaccgtagccgtcaccattcgtccagccaagccaatccagacgctcctccaaagcatccacagcaataccaggccacgacaccacagtctgcacacgctgcaactccggaggaatagccacacccaaatcacgcacccgggcagaaccctcatagtagccctcaatgcgacaatgccacgaagacaacctttgaatacgatcgtacatgccctcaatcagagccaactcatccaagttcataccacagacaccctcttcctaccagaccgttcacgccgcctagccttcgccatcttcgcaccaagatacgccaaagacacagcctccaaaggaacctcagaaccatccttaaacgaggaaccccaaccccacgcagaacccttcttcttctgcacagccgacctcacagcaatatccaacatgtcacgcctcgaatcggcacgaggatgagaaacactcccagaccttacaccctccaggaacgcctgacacgcctccacatacaccccagtatcagccacaatcacgccacggcccggaacaccacgatccgtcaaagccttctgcaacaacaccgcaccagacccggcaaccatgatcttttcagtgtcaccccaacgcaacgccaaccaatcagccaaccggcccacaccatcaacaatcgtgccagacaggccatcaatcacctcaacatgcacaccagcatcagtcctgccagcaccagccaacgcgacacgatcacccgagcgagaaaacgagacaccaaaaaccttcccgccaaccagagccgcctcaaccacagccgactgaacccacttatccgccggaatcaccgacgaagcagactggccacgatcccaccagccaagccgctcccgagcaaacccggccgcagacatcgactcatgctcatccgagactgtaccaaaattcaggcgacgccccaacgctggattagtgtcaccagcaagcttccgccactgccgcgacacatcatccggatcagactcgtcaggaatcgaaaactccgtccacgcaaaccttttaccacccgacaaagcctgcccgcgaagacgcaacaccacagacccgtcagccaacggcccaggcggcgtacccaaaaaaatctgctgaggatcacccgaaggagccgcagacaccgtaggaagcaaagcctccaactgctcatccgacaactcctgagcctcatcacacaccaaatcatcaaccgtaaacccacgagcagaaccccggctacgggccacaaactcaaccgaaccccaacccggacaaccacacttacgctcaaacgtggcacaatccggatgatgcaacacaatagcctcctggccattcgtcgcacgaatcgacctcaccatacgatacaaatcaggaaactgccgctcattctcaaaaaacgacctcaaccgcataaacgccttacgagccgacttcaactcgtgggccgtatgcaaaatacggcgaccctgaatagtcgccttaaacaactccacaatctccaaaatagcattcttgccattctggcgaggcacaaacaccccacacacacccgaagcaagcctgccattaccacccacagcaagccaatcatccaacacctgctgctgccacggatcaggcgtcaacccatacgcacgacccaactccccagcatcacccccagcagacaccgaatacgccgcagccacacgatgacgaggcacctgagacccaacaacaccagacattaggcccctttacgcttccgataccggtcaatcatcgccaccgcagaacccccaccacggccaccagacaccacatcaaccgaataacgatccaacatgcccataaaagccttcacatgagcacgaagcgaagccaccaaatccgccctgccctcacgccacacacaatcatgaatcaccgcagcatccatgagaaacaaccactcctcatcagacacatacggcgcgcgactatcctcaccccacacacgccaccaacgacgcgtctccccacaccaatcgtgtccctcaggaagctcaggctgcacaacactcaccaccaacacaaaaagtcgacaaacagacaaaaccacaaaagggaggtatttcactaagccgtacgtggttttgcacgggtgtgcagggggtggttcccgtggggtttgtggttttttcaccatgggatcagggtttttgtggtttgttgttggaaactaatgtttggttcgctgcgattgcctttgcttctgttgcatgttctgcagatgatttgcccgttgtcgagggtgttgagtcctccccggctgacgggtgtgatgtggtcggcttcggggctggttgggagctggtgtgtgccccaggtgatggtggctccgcagagtgggcattcggtttggccttgttgtcgggcttggttgatgagccttgcccgccagcgccggtgtgaggcggatgctgtgcggttggtgtgtgccatcacgtcccccgatcatctatggcccctgtgagcctctcattgctcctgtaacggcctagaaggtgttgggggtatgaataccctaccggtgccctgctagtcaattctgggggctgttttgtttgtttggcggggtgttctgtttgtgccggggtgcttgttttctccactacccccatgggtgtgagaaagatcacatcgcccccagtggtgtcaaaagaagaaggacacggaagaaaaatgggggtggatgggtgttcacgtttcacagcttagcgcctagcgcctagcgttgaaggacacaggctcagcaggaacaccttaagggttttaaagtcttctacttataatatgtactttaagtcttacctggtgttaagggtttaagcgtgacacgccgtacgccttcagccgaacacgccaagccgtaaaggggacacgggtgaaagagtgtggggagtgtgcgatgggagcttgcgaccagaagcacacgagacacacggcgaaaagcccatcagcgttgacggtaaaaggttcctcttctcccctgatgaagaaaagaagagaagagagaaagaaccaaagagagaagagaagtaaagaagttaactcctttacttctctaaaaacttttataacttataagctttaatacttatattatattattatacctataagctttaagacttataggttatcatagtaaagtttaagactgatggttaactttaagtacttaaggtctttaatgttttatagttactttaagtgtttaaagctttaaggttttaagtcttaatagttattttaagttttaaagtcttaaacactgatgtaaagtttatatccttaagtgcttagcctttaaggttttatatgtactttaagtgtttaaggcttgaaggctgatgccgagcccttgaggggctcggtgctaagctatcagtaccttagcgctaagcccttaggtctttaagtgtttggtagactgatggatgtgagggtgaaagccgcgtcagcggatttcggccttgcgtccagctggctacctgtccagcctatcataccccacctggtatgagtcaaactggtggttttggctctataggcgggtttgagggctgtaaacgggtgtttttggtagtaaaggtccaaaaattaaacctaaacttttccttaaattttcttagagtcttgtaacctttacaggtggttaaggctgaaacccctagtcggaacgggtttcactcccggacagctgtcacaccttgacccgtatcctttccgaacacgctaggcccatcagtgctgagggtattccctcaggctttcgagtactcgtcgctagggctcctcgtactctcaagccttccctgatggcgtgtacccttttcagtgctgtgcctgatcggctgagcctgctcgggctgtcaggctgatgccgagcccttgaggggctcggtgctaagcccatcagtgctaagaccctaaggctgatgctccccctctttcttttaccgtgtccttcttcccccttagtaaccaacactgtccacatagttgaggcttggctaaccaggatagggactgatgatctatgctgagatggttgatcgtgtatcaggctcctggggggcgtctagaatcgatcagaattgcttgggggtatgaatacctagcccccaccccgtaaggcgctcctaggcgccatgtcacagctttaaacggcatttctgggctacaccctccacgccagatcggcagagtggtcttgagggtgcacaccaagccagggggatgtggcctatctcacatagtatgagggtgtagattccatgccacacccatatgaaacgctcaatccgaatgagcgcccccttgactatggggttgcaacctacacactctagaaaccacaacaacccctacaccaccgaaaggagcaccccctatggatggcacactcatcacaccatccttcacatccctttacaggcagacagaaatcgacccgctcagcctccacagcctcaccggagaccattcagacgacatcgatctggatatggtgcgccgcatgtaccacgccaaagtcgaagaagccatacgactcatccgacccatgtggactgttaccctcgacggtgcagtgtatgggccacccggctggcgccacctctccgagaatgaggccgaggaactcaacgacatgatcgacatgatcgacgtagacgtcatcctcaaagcatccacccgataaaccctcaacaacgttatcagcaacgaaaaggacataatcatgcagaagatcgccaaccatttcacccagctctacacccccaccccggactgccctgagcctttcgacctgacacgcctcgaaaacctctcctgcgaccatatggattttgagggcctcgccgaagcctaccggcagagcgtggaagccgaactccacaagctacgccccaacacatttatcgcatccgatggcaccgtgttcagccatgatgagtggaagccgctcacacagacggaggcgacacaactctactggaatgtgacccgcatcaacgtaggccacctactcaccctgttcgcccgataaccctcagccacacaaactgagcctagaatcgcctagaaatacctgacctatataatcatacccccaagggctgaaagtcgctaaaatggcactacaggaagtcttataatggaaaataggagcaatcatgcaatggacatgccacaagtgcgatagcacaatcatcggatacaagccagagcactgcacaatctgccacgaaacattcacgagtaccacctcaggcgacatgcaccgggtaggcgatcacggggtcaagacaggccccaatcgccgcaggtgcctcactatcgacgagatggacgccaagggcatgcagcgcaacaaactcggatactggaccagcggtggcacatcctattgggcgaaagaagccatcacccctagccacacaagtatcgctcacacaaactgagcgcagccttgacagtgggcccagccgctgaaagtattaaccatgtcagcaacgaacaacaccccggaaaggggaacacaaagccatgaacaagaaaacaggctacaccatcgcaggcgccacagccgccatcatcgccgcagcctcattcatgccagcccccggcgacaatccgccactcgcctcacagccagccccacaagccaccacagccaacaccgcctggacacccaaaaccgtccaacagcgcaaagccgaaaaaacagccaagcaggccgccgcagaacagtcactgcgagccgaacagcagaaaacccacaagcaagcccaagcaaggggtgaagaaacctccacaggtctcaccatgatcaccgcggcacacacctgcaaccgcaaagccgaacaacaggccgcagcacaaggcgtcaactggaatggcaaccccgacatcgacctccaactccacaaagtcatcggcgcccacaaagacacctttactatcgtctacggcgccaccgcgaaacagcctggcgcatccaaactccccgtcaccgtccactgcctcgtcaccggaacagaagaccatccgcacgtcaccgacctcaacatcaacccgcaacagtaaccccgtcaaggagcgccccccagtcatgcccatcctctcccactacgctgtcaccaccggactcgccgacacggcacacattattcaccacaccggcggcacactacgcacagccaccgatattgcctcccgcatcaacaccctcaacccggacatcaatctcgaccacgaaatcaaacagctacaaaacatcgaagccgacctgtacaacatttacacaaccatcaacaccattcttcaggagcaagcatgaacacacccaacaacattgagctgcacagctacgaaacgttcttcaccacactggcatggatccagggcgccatcatcacatggatgtacgccaccggcaccggccacaaggcagccctcgccatcatcgctgcatgctccctcgccaccctcctaggcgcctcaaccctcaccaacaatccccgagacaccaaatgatcacaacacccatcatcattgctgaaaccctcgccatcattattctcgcagtagcactcgcccacaaccccaaccagtaacccacatttaaggagcacacaccatggatgagcccaccagcatgtacaccgaccctgatactggtgcccgaaaagaattgaaactttgcaggctatccctcatcgaccctacagcccttcacgccctcggctccgtggccggatatggtgccaccaaatacggcgacaacaactggaccggcggctatccgtggagccacagtgtcgacgccctctacaggcacctgctatcatggcagcaaggaaacaacctcgaccacgagtccgggctaccccatctggcccatgccgcctggcactgcttggcactcctcgcataccagcaacacgatgccggccaagacacccgcaacccatggaacacccacaaaagcgacaagtaatgcccctagcacaatatccgaaaaccatccaccatccaggccacatctcctacagttcactcacccagtgggccgaatgcggcgaaaaatggcgcctatcccacggctaccacaccatgcaccacacctggtacgccaccatcgccggaagcgccatacaccacatcaccgaacaatacgacctacacctgtacaatcccgccgaataccctgcactaccagacaaactcgcatccttcacaaacgttttcgacacccaagtcgccctcgccgaatccgaaggcacagaaatcaaaccctccggccgagtgtgcaaaaacatgtgcgaaagcgggggccccaacaagaaagactacaattggtggatgatgtacggccccatctttgtggaccggtggaaaacatggaggcgcaaccacccagaatacgctaccgctgttattgacggccagccaggcatcgaatacccggtagaaaccaccctccaagacggcacccagattgttggctacatcgaccgggtattcacagatacgaatacgggtgaaacctttattttggacctcaaaaccggccgcctacccgccgacagtatgcagctgtacacataccggtacatgctcgcccaacacggcatccatgtgacgaaaggcatgttttggacacccgcatcaactaaaacagacaaacagtccgccaagcagggcacagcaaccgaactctacgaccttgacaacaacacctaccggcatgtatcatccatgtacagtcaagcaatgaaaggaatccgccaaggcatcttcgtaccccacgtcacagcactctgcaaaggatgccccgtcagggacgcctgctgggccgtcaacgggaaaaacgcctacagatacccggtagaaaccaccgtacagccaccccaaaccgaaaacaacgaaaaggaaaacacgtgaccgacgagcacaccacagacaacggaaagctaactatcacactcaaatacggtggcgactatgctgccccatggacagtcatccgcggagacaccgcagaagacatcaaacaatccatcattgacctgctaggaggattgaaagacgaaaccgtctccaaagactgggacctcgcaaccctcatcgctagcgcagcaatcctgcttcaagaccgatacgataaagccgccaaagactacgtcaacaaaatcgccaaccaggaaaacaccatcgtcatcgacaaaatcaacaatgcaacaagcaagacacagctagccgaccttctgaaacaatacaagaagatcatcaccagtaacagtgacgtgtccgaggcgttccgcagcaaacgaaacagcctcacccgataaaccaatataagacaacaaaaacagacacaacagtaaaggaaacaacaatgggactcgccaactaccgcaacaacaacagcaacagcaccttcttcaacccctcccgaaaccaggacgccaccgccatcgccttcaaaatccgcgacgtagaacacaacactgaaggctacggtggacagaccgcagaccgcatctacgctgatgtcactatcttccacaccctccaggatctcaacaacggcaccccagaaaccatccccaacgctattattgagaaagcccgcggcaacaacgaccgcccacattccatgatccgcgacctcgaaacctacctgggcgaagaacaagccttcaaactcgccaccgtgcgcaccaaaaacgggttcaacgcggtcgtgctcaaacccctcgacgacgccatctacgataaggttgccgaatacgtagacaa

SEQ ID NO: 13 - DNA, 29581 bp, Propionibacterium acnes bacteriophage
ttagctaagcctcaactatgtggacagtgttggatactgtgggggaagaaggacacggtaaaagaaagaagggggagcatcagccttcacgccttaaggtcttagcgctgagcaccgagcccctcaagggctcggcatcagcctcatcgggctcagccgatccggcacagccttagcaagtacacaccatccagggaaggcttgagagtacgaggagccctagcgacgagtactcgaaagcctgagggaacaccctcagcactgatgggcctagcgtgttcggaaaggacacgggtcaaggtgtgacagctgtccgggagtgaaacccgttctgactaggggtttcagccttaaccaccctcaaaggttacaagactctaagaaaatttaaggaaaagtttaggtttaatttttggacctttactaccaaaaacacccgtttacacccctcaaacccgcctatagagccaaatccaccagtttgactcatcccaggtggggtatgataggctggacaggtagccagctggacgcaaggccgaaatccgctgacgcggctttcacccttacatccatcagtctaccaaacactttaaagcttcaaggctaagcgctaagcctttaagaccttaacacttagcaccgagcccctcaagggctcggcatcagccctaagagcttagcccttaaggatctaagttactataaaagctttaaacactttaagtaaacttaagagcctaacacttaaagttaattaataaccttaacagctaagcacctaagataacatataaaccttaaaggcttacacacttaacactgagccctttaaggctcagcatcagtataaagaccttaacacttaagttaatatttaaaccttaaaggctaagcacttaaggatataaacttcacatcagtatttaagacttaaaggcttataagctttaatactttaagtaactataaaacattaaagaccttaagtacttaaagttaaccatcagtcttaaactttaatattataacctataagtcttaaagcttataggtattataatataagttattaaagcttataagttataaaagttttagaagagctaaggggttaacttctttacttctctactctctttggttctttctctcttctcttcttttcttcatcaggggagaagaggaaccttttgctgtcagcgccgatgggctttcaccgtgtgactcgtgtaccaccggtcgcacgctcccggttgcacactccccacactctcacaccccgtgcccctttcaggcttggcgtgttcggctgaaggcgtacggcgtgtcatgctcacacccttaacactaggtaagacttaaagtgtacattatatgtagaagactttaaaacctatagggtgtttctgttgagccgtgttccttcacgctaggcgccaagcgctaagccttgaaatgcgaacacccacccaccccctttttctttcgtgtccttctcttttgacacagctggggggcgatgtgatctttctcacatgccaggggggtagtggagaaaacaaacaccccaccacaaacagaacgccccctcaaacacacaaaacagggcctaggatcgatcagcagggcaagggcaaggtattcatacccccagacgattccaggccgttacaggggcaaataagacccatacagggctaggtgaggaacagacacatcatggcacgcaccaatcgcacagccagccaagcccaccgccgctggcggcaacgactcatcactcaagcccgacagcaaggccaaaccgaatgcccactctgcggagtcaccatcacctgggacacacacgacctgccaaccagccccgaagccgaccacatcacacccgtcagcaggggaggactcaacaccctcgacaacgggcaaatcatctgcagaacatgcaacagaagcaaaggcaatcgcagcgaaccaaacatcaagttccaacaacaaaccacaaaaaaccttgtttcatggtgaaaaacccgccaacccccaccggggacaccccctgcacacccgtgcaagaccacgtacggcttagtgaaatacctcccttttgtggatttgtctgtttgtcgactttttgtgttggtggtgagtgttgtgcagcctgagcttcctgatagtcgtgattggtgtggggagacgcgtcgttggtggcgtgtgtggggtgaggatagccgcgcatcgtacgtgtctgatgaggagtggctgtttctcatggatgctgcggtgattcatgattgtgtgtggcgtgagggtcgcgcggatttggtggcttcgcttcgtgctcatgtgaaggcttttatgggcatgttggatcgttattcggttgatgtggcgtctggtggccgtggtgggggttctgcggtggcgatgattgaccggtataggaagcgcaagggggcctgattaggtgtctggtgttgttgggtctcagattcctcgtcatcgtgtggctgcggcgtattcggtgactgctgggggtgatgctggggagcttggtagggcttacgggttgacgcctgatccttggcagcagcaggtgttggatgattggctggctgtcggtagcaatggcaggcttgcttcgggtgtgtgtggggtgtttgtgcctcgtcagaatggcaagaatgctattttggaggttgtggagttgtttaaggcgactattcagggtcgccgtattttgcatacggctcacgagttgaagtcggctcgtaaggcgtttatgcggttgcgttcgttttttgagaatgagcggcagtttcctgacttgtatcgtatggtgaagtcgattcgggcgacgaatggtcaggaggctattgtgttgcatcatccggattgtgccacgtttgagcgtaagtgtggttgtccgggttggggttcggttgagtttgtggctcgttctcggggttctgctcgcggttttacggttgatgatttggtgtgtgatgaggctcaggagttgtcggatgagcagttggaggctttgcttcctacggtgtctgcggctccttcgggtgatcctcagcagattttcctgggcacgccgcctgggccgttggcggatggttcggttgtgttgcgtttgcgtgggcaggctttgtcgggtggtaaaaggtttgcgtggacggagttttcgattcctgacgagtctgatccggatgatgtgtcgcggcagtggcggaagttggctggtgacactaatccggcgttggggcgtcgtctgaattttggtactgtgtcggatgagcatgagtcgatgtctgctgccggttttgctcgggagcggcttggctggtgggatcgtggccagtctgctgcgtctgtggttcctgctgataagtgggctcagtctgctgtgggtgaggcgagtctggttggcgggaaagtgtttggtgtctcgttttctcgttctggggatcgggttgctttggctggtgccggcaagactgatgctggggttcatgttgaggttattgatgggctgtcgggaacgattgttgatggtgtgggccggttggctgactggttggcggttcgttggggtgatactgaccggatcatggttgccgggtctggtgcggtgttgttgcaaaaagcgctgacggatcgtggtgttccgggccgtggcgtgattgtggctgatactggggtgtatgtggaggcgtgtcaagcgtttctggagggtgtcaggtctgggagtgtttctcaccctagggctgattcgaggcgtgacatgttggatattgctgtgaggtcggctgtgcagaagaagaagggttctgcgtggggttggggttcctcgtttaaggatggttctgaggttcctttggaggctgtgtcgttggcgtttttgggggctaagcgtgttcgtcgtggccgtcgggagcgtagtggtaggaagcgggtgtctgtggtatgaactcggatgagttggccctgattgagggcatgtttgatcgtatccaaaggttgtcttcgtggcattgccgtattgagggctactatgagggttctgcccgggtgcgtgaccttggtgtggctattcctccggagttgcagcgtgtgcagacggtggtgtcgtggcctggtattgcggtggatgctttggaggagcgtctggattggcttggctggactaatggtgacggctacggtctggatggtgtgtatgcggcgaatcggcttgctacggcgtcgtgtgatgtgcatttggatgcgctgatttttgggttgtcgtttgtggctgttatcccccaggatgatgggtcggtgttggttcgtccgcagtcaccgaagaattgcacaggcaagttttctgccgatgggtctcgtttggatgctggccttgtggtgcagcagacgtgtgatcctgaggttgttgaggcggagttgttgctgcctgatgtgattgttcaggtggagcggcgtgggtctcgtgagtgggtcgaggtgggccgtataccgaatgtgcttggggcggttccgttggtgccgattgtgaatcggcgtaggacgtcgcgtattgatggccgttcggagattacgaggtctattagggcttacactgatgaggctgttcgcacactgttggggcagtctgtgaatcgtgacttctacgcctacccgcaaaggtgggttacgggtgtgtcggctgacgagttttcgcagcctggctgggtcctgtcgatggcttctgtgtgggctgttgataaggatgatgacggtgataccccgaatgtggggtcgtttcctgtcaatagtcctacaccgtattcggatcagatgagattgttggcgcagttgacggccggggaggctgcagtgccggagcgctatttcgggtttatcacgtctaatccgccgtcgggtgaggcgttggctgccgaggagtcgaggcttgtgaagcgtgctgagcggcgtcaaacgtcgtttggtcagggctggctgtcggttggtttcctggctgctaaggcgttggattctcgtgttgatgaggccgatttttttggtgatgttggtttgcgttggcgtgatgcttcaaccccgactcgggctgctacggcggatgctgtgacgaagcttgttggtgccggtattttgcccgcggattctcggacggtgttggagatgttagggcttgatgatgtgcaggttgaggctgtgatgcggcatcgtgccgaatcttcggatccgttggctgcgcttgctggggctatatcgcgtcaaactaacgaggtatgataggcgatggcttcgggtgttgcgtcgaggttggctgctaccgggtatcagcgtgaggcggtcaggtttgccgggaagtatgcgggctattatgccgagttgggtcgtttgtggcattccgggaagatgagtgacacacagtatgtgcgtttgtgcgtggagttggagcgtgccggccatgacggttcagcagctatggcagctaaattcgtgcaagattttcgccggttgaacggtgtcgatcctggtttgatcgtgtatgacgagtttgatgctgccgcagcgttggctaggtcgttttcgactatgaagatgatgaatagtgacccggatagggcgaatgacacgattgatgcgatggctgcgggttttgatcgggctgttatgaatgctggtcgtgacacggttgagtggtcggcgggtgcgcagggtaggtcgtggcgtcgggtgacggatggtgatccgtgtgctttttgtgccatgttggctacgcgatcggattatacgacgagggagcgggcgttgactgtgggtcatactcggcgtcataagcgtggtggtaagcgtccgcttggttcgaagtatcatgatcattgtggttgtacggtggttgaggttgttggcccttgggaaccgaatagggctgatgccgagtatcagaggacgtatgagaaggcccgtgagtgggttgatgatcacgggttgcagcagtcgcctggcaatattttgaaggctatgcgtactgttggcgacatgagatgatggtttccggttgtgcgtcgccggttatcggtgcacagggttgtctcccgcacgggggtcaacaatattgtgttgttttccgcaaggagtatagggttaggctatggccgatcaagaagttgaagaacagaatgtcaacaatgatgctgttgagcccggaaagggtggagacattgttgatgttatgaaggatgagcgggctgccggcgatgatcatgccggtgatgtttctgtgaagggtgaggtttctgggccgtctggtacggattggaaggctgaggctcgtaagtgggagtctcgtgctaaaagtaatttcgccgaattggagaagcttcgcgcctcggatggtgattctggatctactattgatgagcttcgccgcaagaatgaggaactcgaggctaggatcaacgggtttgttcttgatggtgtgaagcgcgaggtggcttccgagtatggtttgtccagtgatgcgatcgttttcttgtcgggtggcgataaggagtcgcttgccgagtctgcgaaagctttgaagggtttgatcgaccatagtagtggtggcgcgggtgtgcgccgtcttgcggggagtgcccccgttgatgatgttaaacgacgtgagggtgtcgcgtttgtggatgctcttgtcaataattctaggagatgatttctgatggctgacgattttctttctgtagggaagcttgagcttcctggttctatgattggtgcggttcgtgaccgtgctatcgattctggtgttttggcgaagctgtcgccggagcagccgactatttttggtcctgtgaagggtgccgtgttttcgggtgttcctcgcgcgaagattgttggtgagggcgaggttaagccgtctgcttcggttgatgtttcctcgtttactgcgcagcctatcaaggtggtgactcagcagcgtgtctcggacgagtttatgtgggctgacgccgattaccgtctgggtgtgcttcaggatctgatttcgcctgccctgggtgcctcgattggtcgcgctgttgatctgattgccttccacggtattgatcctgctacgggtaatcctgctactactgtcaagtcttcgctggataagacgaagaatgttgttgatgccacggattctgctacggccgatctggttaaggctgtcggtcttattgctggtgctggtttgcaggttcctaacggtgttgctttggatccggcgttttcgtttgctctgtctactgaggtgtatccgaagggttcgccgcttgccggccagccgatgtatcctgccgccggtttcgctggtttggataattggcgtggcttgaatgttggtgcttcttcgactgtttctggcgccccggagatgtcgcctgcctcgggtgttaaggctattgttggtgatttctcgcgtgttcattggggtttccagcgtaacttcccgatcgaactgatcgagtatggcgacccggatcagactggccgtgaccttaagggacataacgaggttatggttcgtgccgaggctgtcctgtatgtggctatcgagtcgctttattcgtttgctgttgtgaaggagaaggctgccccgaagcctaatccgccggctgagaactgatttattgttgcggtgatgtgtcaatgtgcagggggtggtgttgatgggtatcattttgaagcctgaggatattgagcctttcgccgatattcctagagagaagcttgaggcgatgattgccgatgtggaggctgtggctgtcagtgtcgccccctgtatcgctaaaccggatttcaaatacaaggatgccgctaaggctattctgcgcagggctttgttgcgctggaatgatactggcgtgtcgggtcaggtgcagtatgagtctgcgggtcctttcgctcagactacacggtctaatacgcctacgaacttgttgtggccttctgagattgctgcgttgaagaagctgtgtgaggggaatagtggggctggtaaagcgttcactatcacaccgaccatgaggagtagtgtgaatcattctgaggcgtgttccacggtgtggggtgagggttgctcgtgcgggtcgaatattaacggctacgctggccctttgtgggagatatgatatgaccagttttccttatggtgaaacggttgtgatgcttcaaccgactgttcgtgtcgatgatcttggtgacaaggtggaagactggtctaagcctgtcgagactgtgttacataacgtggccatctatgcttccgtttcgcaggaggatgaggccgcggggcgtgactctgactatgagcattggtcgatgcttttcaagcagtctgttgtgggcgctgattatcgttgtaggtggcgtatccgtggtgttgtgtgggaggctgacgggtctcctatggtgtggcatcatccgatgtctggctgggatgcgggcacgcagatcaatgtgaagcgcaagaagggctgatgggtagtggctcaggatgtgaatgtgaagctgaacttgccgggtattcgtgaggtgttgaagtcttctggggtgcaggctatgttggctgagcgtggcgagcgtgtcaagcgtgcggcctcggcgaatgtgggcggtaacgctttcgataaggcccaataccgtaatggtttgtcgtcggaggtgcaggttcaccgtgttgaggctgtcgctcgtataggcaccacatataagggtgggaagcgtattgaggcgaagcatggcacgttggctcgttcgattggggctgcgtcgtgatcgtctacgatgaccccaggaagtgggctaaacgcgtgctcaaggatgatggctggctgtcggatataccctgtgtggggacggtgcccgatgattttacgggtgacctgatttggttggcgttggatggtggcccgcagttgcatgtgcgtgagcgtgtttttttgcgcgtgaatgtgttttctgatacgcctgatcgggctatgtctttggcgcgtcgtgttgaggctgttctggctgacggggttgatggtgatccggtggtgtactgtaaacggtctactggtcctgatttgctggttgatggtgcacgttttgatgtgtattcgctgttcgagctgatatgtaggcctgcggagtctgaataagcttattgtttttgttttaatgtaattgtttgatatttaatgggggttgtgatggctgcaacacgtaaagcgtctaatgttcgttcagcggttactggcgatgtttatattggtgacgcgcacgcgggtgatactattaagggtgtggagccggttccttccggtcttaccgctttagggtacctgtctgatgacgggtttaagattaagcctgagcgtaaaacggatgatttgaaggcttggcagaatgcggatgttgttcgcacggttgctaccgagtcgtctatcgagatttctttccagctgatcgagtctaagaaggaggttattgagctgttttggcagtcgaaggttactgccggatccgattcgggttcgttcgatatttctccgggtgccacgacgggtgttcacgccctgttgatggatattgtggatggcgatcaggttattcgctactatttccctgaggttgagcttgtcgatcgtgacgagattaagggtaagaatggcgaggtgtacgggtatggtgtgacgttgaaggcgtatcctgcccagattaaccataagggtgatgcggtgtctggtcgggggtggatgacggctttaaaagctgatactcctccggttcctccgaagcctcagccggatccgaatccgccgtccgagaactgatacacgattttagggattgttgatagatgagtgacacaggttacacgttgaagattggtgaccgtagctgggtgttggcggatgcggaggagacggctcaagctgtgcctgccctcgtgtttcgccgtgcagctaagattgcccagtcgggggagtcggcggatttcgcccaggttgaggtgatgttttctatgttggaggctgccgccccggctgacgctgtggaggccctggaggggcttcctatggttcgtgttgccgagattttccgtcagtggatggaatacaagcctgaccagaaagcggcctccttgggggaatagtttggctccacggcctgattgatgattatcgtggggccatcgaatatgattggaggacccggttcggttgctcggtttatgatgttggtggcccgcagatgtgttggggtgaggctgtccggctggctggcgtgttgtgtaccgatacgtctagccagctggcggcccacctgaatggttggcagcgcccgtttgagtggtgcgagtgggcggtgttggacatgctggatcattacaggtctgctaatagtgaggggcagccggagcctgtggcgaggcctacggatgagcgtagggcccggtttacgtctgggcaggtggacgatattttggcgcgtgttcgtgccggtggcggggtgtctcgcgagattaatattatggggtgaatagtgtatgtctggtgagattgcttccgcatatgtgtcgttgtatacgaagatgcctggtttgaaggcggatgttggtaaacagctttctggggtgatgcctgcggagggtcagcgttcgggtagcttgtttgctagcgggatgaagttggctttgggtggcgccgcgatgatgggtgctatcaatgttgctaaaaagggtctcaagtcgatttatgatgtgactattggtggcggtattgctagggctatggctatcgatgaggctcaggctaagttgactggtttgggtcatacgtcttctgacacgtcttcgattatgaattcggctattgaggctgtgactggtacgtcgtatgcgttgggggatgcggcttctactgcggcggcgttgtctgcttcgggtgtgaagtctggcgggcagatgacggatgtgttgaagactgtcgctgatgtgtcttatatttcgggtaagtcgtttcaggatacgggcgctatttttacgtctgttatggctcgcggtaagttgcagggcgatgacatgttgcagcttacgatggcgggtgttccggtgttgtctttgcttgctaagcagactggtaaaacgtctgctgaggtgtcgcagatggtgtcgaaggggcagattgattttgccacgtttgcggctgcgatgaagcttggtatgggtggtgctgctcaggcgtctggtcagacgtttgagggcgctatgaagaatgttaagggtgccctgggttatcttggtgctacggctatggcgccgtttcttaacgggttgcggcagatttttgttgcgttgaatccggttataaagtcggtgacggattctgtgaagcctttgtttgcgtcggtggatcagggtattcagcgggtgatgccgtctattttggcgtggattaatcgtatgccgggcatgattacgagaatgaatgcacagatgcgcgccaaggtggagcagttgaagggcatttttgcgagaatgcatttgccggtccctaaagtgaatttgggtgccatgtttgctggcggcaccgcagtgtttggtattgttgctgcgggtgttgggaagcttgttgcagggtttgccccgctggcggttgcgttgaagaatctactgccgtcgtttggtgctttgaagggtgccgctggtgggcttggtggcgtgtttcgcgccctgggtggccctgtcgggattgtgatcggcctgtttgcggcaatgtttgccactaacgcccagttccgtgccgctgttatgcagcttgtggctgtggttggccaggctttggggcagataatggccgctattcagccactgtttggtttggttgctgggctggtggcacggttggcgcccgtttttggccagattattggtatggttgccgggctagcggcgcagcttatgccggtgattggtatgctggttgcccggctggttcctgttatcacgcagattattggtgcggtgacacaggttgctgcaatgttgttgccggcgttgttgccggttattcaggctgttgtggccgtgatacggcaggttgttggtgtaatcatgcagttggtgcctgttttgatgccggtgattcaacagattttgggtgctgtcatgtctgttctgccaccgatcatcggcctgatccggtcgctgataccagtcatcatgtcgattatgcgtgtggtgatgcaggttgttggtgtcgtgctacaggtggtggcccgcattattccggttgtgatgccgattgtgacagctgtgatcgggtttgttgcacgtattcttggcgctattgtgtctgctgcagcccgcattattgggactgtcacccgtgtcatttcatgggttgtgaatcatttagtgtctggcgtgagatctatgggcacggccgtcttgaatggctggaatcatattagagcgtttacgtctgcgtttattaacggtttcaagtcggtgatttctggcggcgtgaacgctgttgtggggttttttgcccggctgggttcttcggttgcctcccatgtgaggtctggttttaacgcggcccgtggtgctgtttcttctgcgatgaatgctattcggagtgttgtgtcttcggtggcgtctgctgttggcgggtttttcgggtcgatggcgtctagggttcgtagtggtgctgtgcgcgggtttaatggtgcccggagtgcggcttcttctgctatgcatgctatggggtccgctgtgtctagcggggtgcatggtgtgctgggttttttccggaatttgcctggtaatattcggcatgctctcggtaatatggggtccttgttggtgtctgcgggccgtgatgtggtgtctggtttgggtaatggtatccggaatgctatgagtggcttgttggatactgtgcgtaatatgggttctcaggttgcgaatgcggcgaagtcggtgttgggtattcattccccgtcgagggtgtttcgtgacgaggttggccggcaggttgttgctggtttggctgagggtattactgggaatgctggtttggcgttggatgcgatgtcgggtgtggctggtcggctgcctgatgcggttgatgcccggtttggtgtgcgatcgtcggtgggctcgtttaccccgtatggcaggtatcagcgtatgaatgataagagtgttgtggtgaatgtgaatgggcctacttatggtgatcctaacgagtttgcgaagcggattgagcggcagcagcgtgacgcgttgaatgcgttggcttacgtgtgattgggggtgttgtgcatgtttattcctaacccgtctgatcgttctggtttgactgtgacgtggtttatggatccgctgtttggtggggagcgtgtgcttcatttgacggattatacggggtcgtctcctgtcatgttgttgaatgattcgttgcgtggtttgggtgttcctgaggtggagcatttttctcaaacacatgttggggtgcacggctcggagtggcgcgggtttaatgtgaagcctcgcgaggtgacgctgccggttttggtgtcgggtgttgacccggatccggatggcgggtttcgtgacggttttttgaaagcgtatgacgagttgtggtctgcttttcctcccggggaggagggggagttgtctgtgaagacgcctgccggtgttgagcgtgtgttgaagtgtcggtttgattcggtggatgacacgtttacggtggatccggtgaatcgtggctatgcgcgctatgtgattcatttgacagcttatgacccgttttggtatggggatgagcaaaagtttcgttttagtaatgctaagttgcaggattggttgggtggcggccctgtcggcaaggatggcacggcgtttcctgtggtgttgacgcctggtgttggttcgggttgggacaatctgtctaataagggtgatgttcctgcgtggcctgtgattcgtgttgaggggcctttggagtcgtggtctgtgcagattgatggtttgcgtgtgtcttcggactatcctgtcgaggagtatgattggatcactattgatacggatcctcgccagcagtctgcattgttgaacgggtttgaggatgtgatggatcgtttgaaggagtgggagtttgcgcctatcccgcctggcggttctaagagtgtgaatattgagatggttggtttgggtgccatggttgtgtcggtgcagtacaggtttttgagggcttggtgaatagttgatggctggtcttgttccgcatgtaacattgtttacaccggattatcgccgtgtggcgcctatcaatttttttgagtcgttgaagttgtcgttgaagtggaatggtttgtctacgctggagttggtggtgtcgggtgatcattctaggcttgacgggttgacgaagccgggtgcacggctggttgttgattatggtggtggccagattttttctgggcctgtgcgtaaggttcatggtgttggtccttggcgttcttcgcgggtgactatcacgtgtgaggatgatatccgcctgttgtggcgtatgctgatgtggcctgtgaattatcgtcctggtatggtgggttcggagtggcgtgctgacagggattatgcccactattctggtgcggcagagtcggtggctaagcaggtgttgggggataatgcttggcggtttccgccggatttgtttatggaagatgatgagagtcgcggccgtttcattaaggattttcaggcccggtttcatgtgtttgctgacaagttgttgccggtgttgtcgtattatcggatgactgtttcggtgaaccagtttgaggataaggtgaatgatcagcggggtttggtgtttgattgtgtgcctgcggtgactcgtaaacatgttttgactgccgagtctggttcgattgtgtcgtgggagtatgtgcgtgacgccccgaaggcgacttcggtggtggttggtggccgcggcgagggcaaagatcggctgttttgcgaggatgttgattcgatggccgagggggattggtttgatcgtgtcgaggtgtttaaggatgcccgtaacacggattctgaacatgtgcatctcatcgatgaggctgagcaggtgctgtccgagttaggggccacgtcggggtttaagatcgagttggctgagtcggatgtgttgcggtttgggccaggcaatctgatgcctggggatttgatctatgtggatgtgggttctggccctattgcggagattgttcggcagattgatgtggagtgtgattcgcctggtgatggttggacgaaggtgactcctgttgcgggggattatgaggataatccgtcggccctgttggctcgccgtgtggctggtttggctgcgggtgtgcgggatttgcaaaagttttgacaagtgattggggtttgttgtgggtattgtgtgcaagggttttgatggtgtgttgaccgagtatgattgggctcaaatgtctggtctgatgggtaatatgccgtccgtgaagggcccggacgattttcgtgtcggtacgactattcagggtgccacagtgttgtgtagtgttttgccggggcaggcttgggctcatggggtgatgtgcacgtcgaatagtgttgagacggtgacggggcagcttccgggcccgggtgagacccgatacgactatgtggtgttgtctcgggattgggagcagaatacggccaagttggagattgttcccggtggccgtgcggagcgtgccagggatgtgttgcgtgccgagcctggcgtgtttcatcagcagttgttggcgactttggtgttgtcgtctaacgggttgcagcagcagttggataggcgtgctatagcggctagggtggcgtttggcgagtctgctgcgtgtgatcctaccccggtggagggtgaccgggttatggttccttcgggggctgtgtgggctaatcatgccggcgagtggatgctgttgtcccccaggatcgagacgggtgctaagtcgatcatgtttggcgggtctgctgtgtatgcttacacgatcccgtttgatcgccagttcagtagtccgcctgttgtggtggcgtctatggctacggctgctgggggtacgcagcagattgatgtgaaggcctacaatattactaataaggattttggtttggcgtttatcacgaatgataattcgaagccgaagaatgttcctgcggtagcgaactggattgctgtcggcgtgtaaattgttgacggtgtgttgtttaatggtggtgtgatgttgggggggctgtggtgtcgtggtttactcctgcactggtggcctctatttgtaccgcgttggctactgttttgggttcggttcaggcggttacgtctaaatctaggaagcgtttacgcaggctgtctgcgcaggtggatgcgatggaagagtatacgtggggtgtgcggcgcgaggtgcgaaggtttaacgccgggcttcctgatgatgtggagccgatgcatcttcctgatttgcctgagtttttgaaggatactgttgatggtggaggtgagtagggttgagggagttggaggaggagaagcggcagcgccgcaattttgagaaggcttccctgatactgttgtttttgtcgcttgtgctgttggtggcgatggctgggggtgctttgcggtatggttctgtggcttcgcaaagggattcggagcaggctaaagcccagtcgaatggtacagctgccaggggtttggctagccgtgtgaagcaggcgtgtgcttcgggcgggcaagagtcggtgcggcttcaccagtctggcttgtgtgtggatgctcagcgtgttgagcggagtgtgcagggtgtgcctggcccggccggtgtgcggggcccgcaagggccgcaggggcctgctggtgttgatggttcggctgggctggttggccctgttggtccgcagggttctcccggtttgaatggtgtgaaaggtcctgacgggttgcccggtgcgaatggatcggatggccatgatggtgttccaggtcgtgcaggtgctgacggtgtgaacggcgttgacggcgctgatggtcgggatggttcggctggtgagcgcggtgatgtgggcccttcaggtcctgccggcccgcaaggtgcacagggtgaacggggtgagcgtgggcccgccggtgtgaacggatccgatggccatgatggtaaggatgggcgttctgtggtgtctgtgtactgttctgatggtcgcctgatggtgaaatttagtgacggtgtggcttctacaatatcgggctcggtggcctgccagggtgtgaaaccgtcgcctgtggttaccgtgtcatcccgcaaatagaagaaggaagggtgttactagtgttggtcgtgtttggtggtggtgtgtggtgagatacattcctgcagcgcaccattctgccggttcgaatagtccggtgaatagggttgtgattcatgcaacatgcccggatgtggggtttccgtctgcttcccgtaaggggcgggcggtgtctacggcgaactattttgcttccccatcgtctggtggttcggcgcattatgtgtgtgatgttggggagacggtgcagtgcttgtcggagtctacgattgggtggcatgccccgccgaatccgcattctttgggtatagagatttgcgcggatgggggttcgcacgcctcgtttagggtaccggggcatgcttacactcgggagcagtggttggatcctagggtgtggcctgccgtggagaaggctgcggtgctgtgccggcagttgtgtgacaagcatggtgttccgaagaggaaactttcggtggctgatttgaaggctggcaggcgtggtgtttgcgggcacgtggatgttacggatgcgtggcatcagtcggatcatgatgatcctgggccgtggtttccgtgggacaggtttatggccgtagtctgcggcggtagtggtagtgaggagttaactgtggctgatgtgaaagctttacatgatcagattaaacaattgtctgcccagcttactggttcggtgaataagctgcaccatgatgttggtgtggtgcaggtgcagaatggtgatttgggtaaacgtgtggatgccctgtcgtgggtgaagaatccggtaaccgggaagctgtggcgcaccaaggatgccctgtggagtgtctggtattacgtgttggagtgtcgtagccgtattgacaggctggagtctactgtcaacgatttaaagaagtgatgtgttgtgggtaaacagttttggttgggtttgtttgagcgtgccctgaaaacttttattcaaacgtttgttgctgtgcttggggtgactgcgggtgtgacttatactgcggagtcgtttcgcggtttgccgtgggagtctgccctgattacggccggggttgctgcggtgctgtcgattgctacctcgtttggtaacccgtcgtttgttgccggtaaaccgaaaacgacgcctgttgtggatgctgggcttgttccaccggatgatcctggaatagtggagtctcacatggttgacgaaacggatcctggcatgatagagcctatcgacgatgccgatactggaggctatgtgccgaggcgtgctgctgagtcggaagttggcacggtagagtctactgttgcataagtgaatatatgtgtgtgccccagcagtgctgccacgatcgtgtggtggttgctgctggggcactatttttgtgtctacaggggttttacaggttgtcgtctagggtgtcttcagcctggtcgacaatgttttgttttgctatgcctggatagttgtcgcggtgattgtagatggcttccagaatgttgtctgccatgatttgtagtgttagggcctggttggtgatgcattccagctcgtctagggcggcctggctagcctccggctgccggttgtccggatgttctgcaaggttgcagtcccacaggatttcttggcatgcatccctggtgtctgcgtccacatcgatgtcgtctaggctgacaccgttggcgttgaggctgatgttgtcgaggttgatgggaaccagatattcgctgctgatgctgcaggtgatgtttgcgagttctgtcatgtttcgtggctgctgctgtatgatgcggcgggccgcggtttttagggctgtgactgttcggtgtctgttactgggcatcgtttctattcttcttccccggtgtagctggtggtgttggtgtactgggtgagtgtgatcaggcactggtcggcccactgtttcaccgtctgccgtgtcacacccaatcgttgggctgccaccgaataggtttgatcatacccgtagacttccctgaatgcggcaagccgtgctagccgtttccgctgtttggatggttcacatgtgagggtgtagtcgtcgatggccagttgtaggtcgatcatgctaactatgttgttgccgtggtgttggggggcggttggtgggggtggcatgccgggttctactgagggtttccatgggccgccgttccagatccattgggctgcttggatgatgtcggctgtggtgtaggtttggttcactggtcaccccttgaacaggttgtcgaggttgtctgggttgctggtgttggtggtgtcgaatcgtccgacgcagtggcagtagtcgtacatgagtttaataatgtgttggtggtcgccgaggtaggtgtttccgctgatgctgtaggtggctgtgccgtctttagagatggtgtatttggcggtgatggtttcgggtgtttcggtgttggtgatgatggcggtggtggtggtgcctacggtttggaggatggtggtttgggtgccgtcgtcgaggatggttttaaccattggggtttctcctttagttgctggtttggttgtctgctagagcggttatttcttgcaccggtttgggtagatctaggtgttggatggttttgttggctagtcgtttggctacacggtagcacatttgggtccactggttgcctgtgagctggtggtattggttgcgcaccgcaatatatagtagagagtcttggtacaggtcgtctgggttgacagtcgggtagcggcgggcaatattggtgcaggctttgtgtagctggtgttggtgggctggtgtggtccatccccaatcggctgtggtggctaggtctgctttggttggtcgtctactcatggcatctattctatcgggctatctggtagttgtttggtgttttgttgttgatagtgtagcacacgagtccggggttgccggtggcgcctgtcctgtgtcggtaccagactgattctccttccatggatgggcattggatgaatgtgcgttgtccttgctcggagatttcgaggtggtgccggtgaccggccatgagtatgtgggatgtggtgccgttgtggaattcttggccgcgccaccattcgtagtgttggttgttgcgccattggtgtccgtgggcgtgaaggattcgggttcctgccacgtcgacggtggtggtcatttcgtcccggctggggaagtggaagtgtaggttgggatattggttgttgagttggtaggcttctgcgatggcccggcagcagtccacatcgaaggagtcatcgtaggtggtgacgcctttgccgaatcgtactgcttctccgtggttgccggggatggatgtgacggtgacgttggcgcagtggtcgaacatgtggacgagttgcatcatggccatgcgggtgagtctgatttgttccgtcaagggtgtttgtgttcgccaggcgttgttgcctccttgtgacacgtatccttcgatcatgtcgccgaggaaggcgatgtggactcgttcgggtttgcctgcttgctgccagtagtgtttggcggatgtgagggagtgtaggtagtcgtctgcgaatcggctggtttctccgccggggatgcctttgccgatttggaagtctcctgccccgatgacgaaggctgcagtgctgtagtcggtgtgggtgtcctgttcgggttttggtggctgccattcggctagtttattgacgagttcgtctatagggtaggggtttgttgcgggttggtggtcgatgattttttggattgatcggcctgtttctccgttggggagtgtccattcggagatgcgtgtgcggcgtacggttccgttggcgagatcatcgttaatggtgtcgatggcgttgtcgtggttggctagctgtgtgaggagccggtctatattgtctatcatcggatatcctcttctgttttctgggtggtgttggtttgtttgcggcggtagtctttgatcacggtggcggagatggggtatcctgcctgggtgagctgttttgctagccatgaggcggggatggttttgtcggcgagcacgtctgcagctttgttgccgtagcgttgaataagggtttcagttttggttgccatgatatcctatcggttgtgtggtgggctgccatcctgtgcggcagtcgccgtcgtgtcctggtttgcgggtgcaccacgatacggttccgtctgtgtggtggagtgttttgccgcacatgacgttttgtagatgctccggcagctcgctattgctatcgttttgctcgtctagcaaagttttttgttgggtgaaaaactcggacacggtgcagttgtggactgggagtatccatgttttccattgttgttgtagccgggtgttccagtggaattgttttgctgcgttcgtggcttgtttgatggttttgaagtagcctacaatgatccgttgatggtcgctatcgggcttgtgtggccctttcaaatattgggcagctacagcgtacctgttgttgtctgtgaagcgcccccagcagtattccaccatgtgtgatagtaccttgtcgggcatgtctcgtacttggttttcgtcgagccacgcgtcgacaatgatgttgcgtatggcttgcttgtctttggtggtgggtttgaatgcgatgctcacagtacgggcctgtcgtcttgcatgaactggttgaaggtgttgttcccggcgtattgggcttgtgtgatttgctggtcggtccagtcggggtgttgctgtttcagataataccagtggcacgcattgtaggtttcgtcttgtagccgggtgagatggttttcggtgatgatttgtttccacatggtccatgacacgtcgagccggtttaggatttcgagggctgggatgttgaattggttgaggaacaggatttcgtgggtgtagtagtttttctcgtaggcgtcccatccgcttcggtgcctgttgggctggtttttggggtaggcttcccggcatactttgtgcaaatgtttggccatgtcgtcgggtagtttaatgtcggggttggcgcggatcatggatcgcatcccatcataggttgtgccccaggtgtgcatgatatgtagtgggttttctccgtcggcccatttttctgcacagatggcgaggcggatacgcctcctggctgcttggctggtgttgcggcggccggggatggggcacgtgtcgaggggatccatggtgttttatatgcctttctttgtttgggttgcttatgtggttttactgtagcacagtgtctagtgcttgtgtcaaccctgtttttccttcctgtaggtaggtgtctgtgacatccccgagggtgaggggcacatgggtggcttgggggagcgctgcctggatggtttgtgccatctggtggcctgcagggtccggatcagaccagatgtaaacatggtcgtagccttcgaagaatttggtccaaaagttttgccacgaggttgcgccgggtagggcgacggctggccatccgcattgttccaagatcagggagtcgaattcgccttcgcaaatgtgcatttcggatgccgggttggccatggcggccatgttgtagatggagcctgtgtctccggctggggttaggtatttggggtggttgtgttctttacaatcgtgtgggagtgagcagcggaaacgcatttttcgtatttcggctgggccgccccaaacggggtaaatgtaggggatggtgatgcactggttgtagttttcgtggcctggtatggggtcattgtcgatgtatccaaggtggtggtagcgggctgtttcttcgctgatgcctcttgctgagagcaggtcgagtatgttttcgaggtgggtttcgtagagggccgaggctttctggattcggcggcgttccgcaatgttgtatgggcgtatgctgtcgtacattcgggtttctttcttctaatcgttgttgtagtttggcgagtccgcctccgacaccgcatgtgtggcagtaccagacgcccttgtcgaggttgatgctcatggagggctggtggtcgtcgtggaacgggcagaggatgtgttgctcgttcctggacgggttgtagcggatccggtgggcgtcgaggaggcggcgggtgtcagaggtgtgggaggagctcgttgagggttgataccacataggcttcgctccatggcttgttgcgctgtttcatcactacgagtccgatggtggaattgttttgtttgtttcggtgtgtttcgtagttgcgtgcctccctgctggcttgtttcacgaattcggcgaggtgtggttgcccggctttagcctcgataatgtaggttttatggccggttgtgaggatgaggtcgccttcgtcttcgcggccgttgaggtggaggcgttcgatattgtgtccggtgttgcgtagctggtggaggagtcttgtttcccattcggctccggcccgccggttgcgtgactgttgtgtcgccatcatagtcctttgtgggttgtggtcatgttccagggctgtttttcggcgagtggcccgaagaatgtgtattcggggtaggctcgcagtctttcgtatcgggttccgtctgggctggatttgcctgtgcgctgtttgaggacggcgatgcgtgcctcggctggtatcgatagcccgttgccgttatcctcgccactatacaatgagactccgaggatgagttgtggtttttcggagaggccgtttttgatttctcgccgtgctggcgggtgttcgatgtcggttccggttttgtcggttgcgtggtgtgtgacaataatggtggatcctgtgtcgcggcctagcgctgtgatccattgcatggcttcttgctgtgcctgatagtcactctcgcagtcttggatgtccatcaggttgtcgataacaatgatgggcgggaaggtgttccacatttccatgtaggcttgcaattccatggtgatgtctgtccatgtgatgggtgactggaacgagaatgtgatgtgttggccgtggtggatgctgtctcgatagtattctggcccgtagtcgtcgatgttttgttgtatctgtgtggtggtgtgttgggtgttgagtgagatgattcgtgtagaggcctcccagggtgtcatatcccccgatatatagagggcgggctggttgagcatggcggtgatgaacatggctagcccggatttttggctgccggagcgccccgcaatcatgacgagatcccctttgtggatgtgcatgtcctggttgcggtagaggggttctagttgtggtatacggggcagctcggctgcggtttgggaggctctctcgaaggatcgttggagagagagcatcggaaccttatctatctgttacggtttgggcggagagtggtggtcagatggagtcgatgtccacatcatcactgcccgtggtgttgggctggctgtctcgcttgtcaacatatgctgctacgaggtcgtagatggcgtcatccaatggtttgagaataacggcgttgaacccgtttttggtgcgcacagtggctagtttgaaggcctgctcttctcccaggtaggtttcgagttcgcggatcatggagtgtggccggtcgttgttgcctcgcgctttctcaatgatagcgttggggatggtttctggggtgccgttgttgagatcatctagggtgtggaagatggtcacatcagcgtagatgcggtctgcggtctgtccgccgtagccttcagtgttgtgctgcacgtcgtggactttgaaggcgatggcggtggcgtcctgatttttggacgggttgaagaaggtgctgtcgttgttattgcggtagtttgcgagtcccataactgttttccttttactgtttatgtttggttttgttggtttttatcgggtgaggctgttgcgtttgctgcggaaggcctcggacacgtcagggttactggtaataatctttttgtactgtttcaaaaggtcggctagctgtgtcttgctggttgcgttgctgattttgtcgatgacgatggtgttttcttgggatgcgatgttgtctacatagtttttggcggcctgatcgtatcggtcttggagaataatggatgcgctcgcgatcagggttgcgagatcccagtctttagagacggtgttgtctttgagtccgcctagcaggtcaataatggattgtttgatgtcgtctgtggtgtctccgcggatgaccgcccacggggctgcatagtcgccgccgtatttgagtgtgacggtgatacggtcatcaccactgctgttggtatcggtcactggttctcctcatctttctctgtcggtggtgtgatggtggtttggatcgggtacctgtaggcgtctttcccgttgacggcccagcatgcgtcccgtacggggcatcctttacacattgtggtgacatgggggacgaagatgccttcgctgattcctttcattgcttgactgtacatggatgatacatgccggtaggtgttgttgtcaagatcgtacagttcggtggctgtgcccccggttggcgatgtggtgttagtgcggctggtggcgggggtccaaaacatgcctttcgtcacctggatgccattctgggcgagcatgtaccggtaggtatgcaactgcatagcatcaaccggcagtcgaccggttttgaggtcgaggatgaatgtttcgccggtgttggtgtcggtgaagacacggtcgatgtagccaacaatcttggtgccgtcctggagtgtggtttcgactggatattcgatgcctggctggccgtccaaaaccgcggtgtggtattgtggatggtttgtgcgccactgtttccacctgtcgacgaagatggggccatagtgcatccaccagtcgtagtcttttttgttggggcctccggtttcgcacatgtttttgcacactctgccggagggtttgatttgggtgccctcttctttgactagggcgatttgggtgtcgaaaacattgttgaaggatgagagtttatcgggtatttcggggtattctgcgggattgtacaggtggaggtcgtattgttcggtgatgtggtgtatagcactgccggcgatggtggcgtaccaggtgtggtgttgtgcatggtagccgtgggataggcgccatttttctccgcattcggcccactgggacagagaactgtaggagatgtggcctggatggttgatggttttcgggtgttgtgctagaggcatgttagttgtttttgttccatgggttgcgggtgtctaatccggtgtcatgctgctggtaggcgaggagtgcgaggcagtgccaggcggcgtgtgccaggtggggtagccctgattcatcgtcgaggttgtgtccttgctgccaggctagcaggtgcctatagagggcgtcaacactgtggctccacgggtatcctccggtccagttgttgtcgccgtatttggtggcgccgtatccggctacttcgccgagcgagtggagggatgcggggtcgatgagggagagcctgcacagtttcaattcttttcgggctccggtgtttgggtcggtgtacatgctggtgggctggtccatggggtgtgctccttagggggttggttactggttgttgttgtgggctagggctacggcgagaataatgatggcgagggtttcagcaataagtatgggtgttgtgatcatttggtgttgtggggattgtaggtgagggttgatgcacctagaagcgatgcgaggacgcatgcggcgatgatggcgagggcggctttgtggctggtgccggtggcgtacatccatgtgatgatggcgccttggatccaggctaggctggtgaagaacgtttcgtaactgtgcaactcgatgttgttgggtgtgttcatgcttgctcctgaagaatggtgttgatggttttataaatgttgtacagatctgtttcgatagataacagttggttgatttggtggtcgaggttgatgtctgggttgagggtgttgatgcgggatgcgatgtcggtggctgtgcgtagtgtgccgccagtgtggtgaatgatatgtgcggtgtcggcgagtccggtggtgacagcatagtgggagaggagaggcatagcggtccttggcgggttagtgttgcgggttgatgttgaggtcggtgacgtggggtgagttttcggttccggtgacgaggcagtggacggtgacgggtagtttggatgcgccgggctgtttcgcggttgcgccgtagacgatggagaaggtgtctttaccaataattttgtggagttggaggtcgatgtcggggttgccgttccagttgacaccgtgtgcggcggcctgttgttcggctttacggttgcaggtgtgtgctgccgtaatcatggtgagtccggttgcggtttcttcacctcttgcttgggcttgcttgtgggttttggcctgctcggctcgcagtgactgttctgcggctgcctgccgtgccgctttctcggctttgcgctgttgggtagtcttgggggtccattcggtgttggctgtggtggcttgcggggcgggctgtgatgcgagtggcggattgtcgtctggggctggcatgaatgaggcggcggcaatgatggcggctgtgattccggcgatggtgtagccttttttcttgttcatgactgttgtcccctttccggggtgttgttcgttgctgacatgattaatcatggtgtgggcggttccctatgtcaaggctgcgctcaacgattgtgagcgatacttatgtggctaggggttttatcgggcgcacagggtgagtagatggccaacattgatgcggctcacattccagtagagttgcgtggcttcaccaccagtgagcggcttccactcgttgtggctgaacacggtgccatcggatgcgatgaatgtgtcggggcgtagcttgtggatttcggcttccacgctctgccggtaggcttcggcgaggccctcaaaatccatgtggtcgcaggagaggtgttcgaggcgtgtcaggtcgaagggtgtggggcagtcgtagctggctggggtgtagagctgggtgaagtggttggcgatcttttgcatgattatttccttttcgttgcttataacgttgttgagggtttatcgggtggatgcgacaaggatggcgtctacgtcgatcatgtcgatgagatcgtggagttcctcagcttcgttctcggagaggtggcgccagtcgtagtcgccgtacacggcgccgtcgagggtgaccgtccacagtggccggatgagtcgtatggcttcttgtactttagcgtggtacatgcggcgcgccatatcgagatcgatgtcgtctgaatggtttccggtgaggctgtggaggctgagcgggtcgatttctgtctgcctgtagagggatgtgaaggatggggtgatgagtgtgccatccatgggtgtgctcctttcggtggtgtaggggttgttgtggtttctagagtgtgcgtgctgcgacctcacagtcaaggctacgctcaatcggattgagcgtttcatgctggagtgtcgggtgtgacagatgtcacttaagcccttatagcctctctaggcgcctgaaatatgtccggggtaggattatatagggttgggcctgccgatcgattctaggggccttctaaggtgtctcaggggtatgtctgggtgatagcaggtgtgacagatgatctagcgagtcgagataggcccacatcgcaaaggtcgaggtgtcagatctgggcataggatctgcaccctatgctgtgtgagatgtatcacatcctcctggcttagcgtgcaccctcacggctactctgcctatctggcgtggagggtgtagaccagaaatgccgtttaaagccttcacatggcgcctaggagcgccttacagggtgggggctaggtgtttatacccccagcacattctgatcgattctagacgcctctaggagcctgatatgccatcaaccatctagacacagatcaccagcccctatcatggttagctaagcctcaactatgtggacagtgttggatactgtgggggaagaaggacacggtaaaagaaagaagggggagcatcagccttcacgccttaaggtcttagcgctgagcaccgagcccctcaa

SEQ ID NO: 14 - DNA, 29912 bp, Propionibacterium acnes bacteriophage
tcgtctatggctacggcggctgggggcacggcctagtgaaatacctcccttttgtggttttgtctgtttgtcgactttttgtgttggtggtgagtgttgtgcagcctgagcttcctgatggtcgtgagtggtgtggggagacgcgtcgttggtggcgtgtgtggggtgaggatagtcgcgcgcagtacgtgtctgatgaggagtggctgtttctcatggatgctgcggtgattcatgatgtggtgtggcgtgagggtcgcgcggatttggtggcttcgcttcgtgctcatgtgaaggcttttatgggcatgttggatcgttattcggttgatgtggtgtctggtggccgtggtgggggttctgcggtggcgatgattgaccggtataggaagcgcaggggggcctgagtaggtgtctggtgttgttgggtctcaggttcctcgtcatcgtgtggctgcggcgtattcggtgtctgctggcggtgatgctggggagttgggtcgtgcgtatgggttgactccggatccgtggcagcagcaggtgttggatgattggctggctgtcggtagcaatggcaggcttgcttcgggtgtgtgtggggtgtttgttccgcggcagaatggcaagaatgctattttggagattgtggagttgtttaaggcgactattcagggtcgccgtattttgcatacggctcacgagttgaagtcggctcgtaaggcgtttatgcggttgaggtcgttttttgagaatgagcgccagtttcctgacttgtatcgtatggtgaagtcgattcgtgcgacgaatggtcaggaggctattgtgttgcatcatccggattgtgtcacgtttgagaagaagtgtggctgtccgggttggggttcggttgagtttgtggcccgttctcggggttctgctcgcgggtttacggttgatgatttggtgtgtgatgaggctcaggagttgtcggatgagcagttggaggctttgcttcctacggtaagtgctgccccgtctggtgatccgcagcagattttccttggcacgccgcctgggccgttggcggatggttcggttgtgttgcgtttgcgtgggcaggctttgtcgggtggtaagaggtttgcgtggacggagttttcgattcctgacgagtctgatccggaggatgtgtcgcggcagtggcggaagttggcgggggatacgaatcctgcgctgggtcgtcgtttgaattttgggaccgtaagcgatgagcatgagtcgatgtctgctgccgggtttgctcgggagcggcttggctggtgggatcgtggccagtcggctacgtctgttgttccggcggataagtgggctcagtctgctgtggttgaggcgcgtctggttggcgggaaagtgtttggtgtctcgttttctcgctcgggggatcgtgtcgcgctggcaggtgctggcaggactgatgctggtgttcatgttgaggttattgatggcctgtctggcacgattgttgatggtgtgggccagctggctgattggttggcgttgcgttggggtgacactgaaaaggttatggttgccgggtctggtgcggtgttgttgcagaaggcgttgacggatcgtggtgttccgggccgtggcgtgattgtggccgatactggcacctatgtggaggcgtgtcaggcgtttttggagggtgtcaggtcgggtgtggtttctcatcctagggctgattcgaggcgcgatatgttggatattgctgtgaggtcggctgtgcagaagaagaagggttctgcgtggggttggggttcctcgtttaaggatggttctgaggttcctttggaggctgtgtctttggcgtatcttggtgcgaagatggcgaaggctaggcggcgtgaacggtctggtaggaagcgggtgtctgtggtatgaactcggatgagttggctctgattgagggcatgtacgatcgtatccaaaggttgtcttcgtggcattgccgtattgagggctactatgagggctcgagccgggtgcgtgaccttggtgtggctattccgccggagttgcagcgtgtgcagactgtggtgtcgtggcctggtattgcggtggatgctttggaggagcgtctggattggcttggctggacgaatggtgacggctacggcctggatggtgtgtatgctgcgaatcggcttgctactgcgtcgtgtgacgtccaccttgatgcactaatttttgggttgtcgtttgtggctgttattcctcaagaggatggcactgtttctgttcgtccgcagtcgcccaagaattgtactggccggttttctgctgatgggtctcgtttggatgctggccttgtggttcagcagacgtgtgatcctgaggttgttgaggcggagttgttgcttcctgatgtgattgttcaggtggagcggcggggttcgcgtgagtgggttgagacgggccgtatcgagaatgtgcttggggcggttccgttggtgccgattgtgaatcggcgtaggacgtcgcgtattgatgggcgttcggagattacgaggtctattagggcttacactgatgaggctgttcgcacactgttggggcagtctgtgaatcgtgacttctacgcctatccgcaaaggtgggttactggtgtgtcggctgacgagttttcgcagcctggctgggtcctgtcgatggcttctgtgtgggctgttgataaggatgatgacggtgacaccccgaatgtggggtcgtttcctgtgaattctcctacaccgtattcggatcagatgcggctgttggcgcagttgacggcgggtgaggctgcggttccggaacgctatttcgggtttatcacgtctaacccgccttctggggaggctttggcggctgaggagtctcggcttgtgaagcgtgccgagcggaggcagacgtcgtttggtcagggttggttgtcggttggtttcctggctgcccgggcgttggattctcgtgttgatgaggccgcgtttttcggtgatgtgggtttgaggtggcgtgatgcttcgacgccgactcgggcggctacggctgatgctgtgacgaagcttgttggtgccggtattttgccggccgatagccgtactgtgttggagatgttggggcttgatgatgtgcaggttgaggctgtgatgcgtcatcgtgccgagtcgtctgatccgttggcggcactggctggggctatatcgcgtcaaactaacgaggtttgataggcgatggcttcgggtgctatgtcgaggcttgctgcgactgagtatcagcgtgaggcggtcaggtttgctgggaagtatacgggctattatgccgagttgggtcgtttgtggcatgccgggaagatgacagatgcgcagtatgtgcgtttgtgtgtggagttggagcgtgccggccatgatggttcggcgtcgttggcggcccggtttgtgtcggattttcgccggttgaatggtgtggatccgggtttgattgtgtatgacgagtttgatgctgcggcggctttggctaggtcgttttcgactatgaagattcttgagagtgacccggatagggcgaatgacacgattgatgtgatggcggcgggtgttaatcgggctgttatgaatgctggccgtgacacggttgagtggtctgcgggtgcgcagggtaggtcgtggcgcagggtgactgatggtgatccgtgcgcgttttgtgccatgttggctacgaggtcggattatacgactcgggagcgggcgcttactactggtcatacgcggcgtcataagcgtggtggtaagcgtccgtttggttcgaagtatcatgatcattgtggttgtacggtggttgaggttgttggtccttgggaaccgaatagggctgatgccgcatatcagaggacgtatgagaaggctcgtgagtgggttgatgatcatgggttgcagcagtcgcctggcaatattttgaaggctatgcgtactgttggtggcatgagatgatggtttccggttgtgcatcgccggttatcggtgcacatggttgtctcccgcacgggggtcaacaatgttgtgttgttttccgcaaggagtatagggttaggctatggccgatcaaaaagttgaagaacagagtgttgacaatgatgttgtggagcccggaaagggtggagacgttgttgatgttgtgaaggatgggcgggctgccggcgatggtgtagccggtgatgtttccgtgaaggaggagtcttcttctggcacggattggaaggcggaggcccgtaagtgggagtctcgtgctaaaagtaatttcgccgagttggagaagcttcgtacatcgagtgacgattctggatctactattgatgagcttcgccgcaagaatgaggaactcgaagacaggatcaacgggtttgttcttgagggtgtgaagcgcgaggtggcttcagagtatggtttgtctagtgatgcgatcgctttcttgcacggcgacgatcgtgaagcactggtggagtctgctaaggctttgaagggtttgatcgaccagagtggtggtggcgcgggtgtgcgccgtcttgcggggagtgcccccgttgatgatgttaaacgacgtgagggtgtcgcgtttgtggatgctcttgtcaataattctaggagatgatttgtgatggctgacgattttctttctgcagggaagcttgagcttcctggttctatgattggtgcggttcgtgaccgtgctatcgattctggtgttttggcgaagctgtcgccggagcagccgactattttcgggcccgtgaagggcgccgtgtttagtggtgttcctcgcgccaagattgttggtgagggcgaggttaagccttccgcttcggttgatgtttcctcgtttactgcgcagcctatcaaggttgtgactcagcagcgcgtaagcgacgagtttatgtgggctgatgctgattaccgtctgggtgttcttcaggatctgatttcgcctgccctgggtgcctcgattggtcgcgccgtggatctgattgctttccatggtattgatcctgctacgggtaagcctgctgcggctgtcaagtcttcgctggataagacgaagcatattgttgatgcaaccgatagcgctacggctgatctgatcaaggctgtcggccttatcgctggggccggtttgcaggttcctaacggtgttgctttggatccggcgttctcgtttgccctgtctactgaggtgtatccgaaggggtctccgcttgccggtcagccgatgtatcctgccgccgggtttgccggtttggataattggcgtgggctgaatgttggtgcttcttcgactgtttcgggtgccccggagatgtcgcctgcctcgggtgttaaggctattgttggtgatttttcgcgtgttcattgggggttccagcgtaacttcccgatcgagctgatcgagtatggtgacccggatcagacggggcgtgacttgaagggccataatgaggttatggttcgtgccgaggctgtgctgtatgttgcgattgagtcgcttgattcgtttgctgttgtgaaggagaaggctgcaccgaagcctaatccgccggccgagaactgatttattgttgcggtgatgtgtcaatgtgcagggggtggtgttgatgggtatcattttgaagcctgaggatattgagcctttcgccgatattcctgaggggaagcttgaggcgatgattgctgatgtggaggctgtggctgtcagtgtcgccccctgtatcgctaaaccggatttcaaatacaaggatgccgctaaggctattctgcgcagggctttgttgcgctggaatgataccggggtgtcgggtcaggtgcagtacgagtctgcgggcccgtttgctcagactacacggtctaatactcccacgaatttgttgtggccttctgagattgctgcgttgaagaagttgtgtgagggtgatggtggggctggtaaagcgttcactatcacacccactattaatagtagatatgcacattctgaggtgtgttccactgtgtggggtgagtgttgctcgtgcgggtcgaatattaacggctacgctggccctttgtgggaggtatgatatgactagttttccttatggtgaaacggttgtgatgcttcagccgactgttcgtgtcgatgatcttggcgacaaggtggaagactggtttaagcctgtcgagactgtgtaccataacgtggccatatatgcttctgtgtcgcaggaggatgaggccgcggggcgtgactctgactatgagcattggtcgatgctgttcaagcagcctgttgtgggcgctgattatcgttgccggtggcgtattcggggtgtggtgtgggaggctgacgggtctcctatggtgtggcatcacccgatgtctggctgggatgcgggcacgcaggttaatgtgaagcgtaagaagggctgatgggtagtggctcaggatgtgaatgtgaagctgaacttgccgggtatccgtgaggtgttgaagtcttctggtgtgcaggctatgttggctgagcgtggagagcgtgtcaagcgtgcggcctcggcgaatgtgggcggtaacgctttcgataaggcccaataccgtaatggtttgtcgtcggaggtgcaggttcaccgtgttgaggctgtggcgaggattggcaccacctataagggtgggaagcgtattgaggcgaagcatggcacgttggctaggtcgattggggctgcgtcgtgatcgtttacggtgatccgcgtgtgtgggctaaacgcgtgctcaaggatgatggctggctgtccgatataccgtgtgtggggacggtgcccgaggattttacgggtgacttgatttggttggcgttggatggtggcccacagttgcatgttcgtgagcgtgtttttttgcgggtgaatgtgttttctgatacgccggatcgtgctatgtcgctagccaggcgggttgaggctgtcctggctgatggtgtggacggtgaccctgtggtgtactgtaaacggtctactggccctgatttgctagttgatggtgcacgttttgatgtgtattcgctgtttgagctgatatgcaggcctgtcgaatccgagtaagcgtatcgttgttttttagtttgattgttttttagtttgattgttttttgggggttgtgatggctgcaacacgtaaagcgtctaatgttcgctctgctgttactggcgacgtctatattggtaaagctcatgccggtgacactattgatggtgtgaagacggttcctgaaggtcttaccgctttaggctatctgtcggatgacgggtttaagattaagcctgagcgtaaaacggatgatttgaaggcttggcagaatgcggatgttgttcgcactgtggctacagagtcgtctatcgagatttctttccagctgatcgagtctaagaaggaggttatcgagctgttttggcagtcgaaggttactcccggatccgattcgggttcgttcgatatttctcctggtgccaccactggcgtgcacgctttactgatggatattgttgatggtgatcaggttatccgctactatttccctgaggttgagcttgtcgatcgtgacgagattaagggtaagaatggcgaggtgtatgggtatggtgtgacgttgaaggcgtatcctgcccagattaataagaagggtgatgcggtgtctggtcgggggtggatgacggctttaaaagctgatactcctccggttcctccttctccgaagcctgagccggatcctaatccgccgtctaataactgatacacatagtttgagggattgttgatagatgagtgacacgggttacacgttgaagattggtgaccgtagttgggtgttggcggatgcggaggagacggctcaggctgttcctgcccgcgtgtttcgccgtgccgccaggattgcccagtctggggagtctgctgatttcgctcaggttgaggtgatgttttccatgttggaggctgccgccccagcggaggcggtggaggccttggaggggcttcctatggttcgtgtggcggaggttttccgtgagtggatggaatataagcctgacggtaagggtgcctctttgggggaatagtttggctccacggcctgattgatgattatcgtggggccatcgaatacgatttccgcaccaagtttggtgtttctgtttatagtgttggtggcccgcagatgtgttggggtgaggctgtccggctggctggcgtgttgtgtaccgatacgtctagccagttggcggcccacctgaatggttggcagcgcccgtttgagtggtgcgagtgggctgtgttggacatgctggatcattacaggtctgctaatagtgaggggcagccggagcctgtggcgaggcctacggatgagcgtagggcccggtttacgtctgggcaggtggacgatattttggcgcgtgttcgtgccggtggcggggtgtctcgcgagattaatattatggggtgaatagtgtatgtctggtgagattgcttccgcatatgtgtcgttgtatacgaagatgcctggtttgaaggcggatgttggtaaacagctttctggggtgatgcctgcggagggtcagcgttcgggtagtctgtttgctaagggtatgaagttggctttgggtggtgccgcaatggtgggtgccatcaatgttgctaagaagggcctcaagtcgatttatgatgtgactattggtggcggtattgctagggcgatggctattgatgaggctcaggctaagttgactggtttgggtcatacgtcttctgatacgtcttcgattatgaattcggctattgaggctgtgactggtacgtcgtatgcgttgggggatgcggcttcgactgcggcggcgttgtctgcttcgggtgtgaagtctggcgggcagatgacggatgtgttgaagactgtcgccgatgtgtcttatatttcgggtaagtcgtttcaggatacgggcgctatttttacgtcggttatggcgcgcggtaagttgcagggcgatgacatgttgcagcttacgatggctggtgttcctgtgttgtctttgcttgccaggcagacgggtaaaacgtcggctgaggtgtcgcagatggtgtcgaaggggcagattgattttaacacgtttgcggctgcgatgaagcttggcatgggtggtgctgcgcaggcgtctggtaagacgtttgagggcgctatgaagaatgttaagggtgccctgggttatcttggtgctacggctatggcgccgtttcttaacgggttgcggcagatttttgttgcgttgaatccggttatcaagtcggtgacggattctgtgaagccgatgtttgctgccgtcgatgctggtattcagcgtatgatgccttctattttggcgtggattaaccgtatgccgggcatgatcactcgaatgaatgcacagatgcgcgccaaggtggagcagttgaagagcatttttgcgaggctgcatttgcctgttcctaaagtgaatttgggtgccatgtttgctggcggcaccgcagtgtttggtattgtggctgccggtgtggggaagcttgtcgcggggtttgccccgttggcggtgtcgttgaagaatctgttgccgtcgtttggtgctttgaggggtgccgctggcgggcttggcggcgtgtttcgcgccctgggtggccctgttggtattgtgatcgggctgtttgctgcaatgtttgctacgaacgcccagttccgtgccgctgttatgcagcttgtgggggttgttggccgggctttggggcagattatggtcgctattcagccactgttcgggattgttgctggcgtggttgccaggttggcgcccgtgttcggccagattatcggtatggttgctggtttggctgcccggctggcgcctgttattggtatgcttattgcccggctggttcctgttatcacccagattattggtatggtaacccaggttgctgccatgttgttgcctatgctgatgccggttattcaggctgttgttgctgttgtgaggcaggttattggtgtcattatgcagttgatacctgttttgatgccggttgtgcaacagattttgggtgctgtcatgtctgttttgccgccgattgttggtttgatacggtcgctgataccggtgatcatgtcgattatgcgtgtggtggtgcaggttgttagtgccgtgctacaggtggtggcccgtattattccggttgttatgccgatttatgtttcggtgattggattcattgccaagatttatgctgcggttatcgtttttgaggctaaggttattggcgctattcttcgtactattacgtggattgtgaatcattcagtgtctggcgtgaggtctatgggcacggccatccagaatggctggaatcatatcaaatcgtttacgtctgcgtttattaacggtttcaagtcgatcatttctggcggcgttgccgcggttgtggggttttttacgcggcttggtttgtcggttgcttctcatgttcggtctggttttaatgcggctcatggtgctgtttcggctgcgatgaatgctattcggagtgttgtgtcttcggtggcgtctgctgttggcgggtttttcgggtcgatggcgtctagggttcgtaatggtgctgtgcgcgggtttaatggtgcccggagtgcggcttcttctgctatgcacgctatggggtccgctgtgtctagtggtgtgcatggtgtgctggggtttttccggaatttgcctggcaatattcggcgtgctctcggtaatatggggtccctgttggtgtctgctggccgtgatgtggtgtctggtttgggtaacggtattaagaatgctttgagtggcctgttggatacggtgcgtaatatgggttctcaggttgctaatgcggcgaagtcggtgttgggtattcattccccgtctcgggtgtttcgtgaccaggttggccgccaggttgttgccggtttggctgaggggattaccgggaatgctggtttggcgttggatgcgatgtctgatatggcgggacgtctgcctgatgcggttgatgcccggtttggtgtgcgatcgtcggtgggctcgtttaccccgtatggcaggtatcagcgtatgaatgataagagtgttgtggtgaatgtgaatggacccacgtatggtgatcctaacgagtttgcgaaacgtattgagcggcagcagcgtgacgctttgaacgcgctagcctacatgtgatagggggtgttgtgcatgtttattcctaacccgtcggatcgttctggtttgactgtgacgtggtttatggatccgctgtttggcggggagcgtgttcttcatttgacggattacacgggtgcgtctcctgtcatgttgttgaatgattcgttgcgcggtttgggtgttcctgaggtggagcatttttctcaaactcatgttggggtgcacggctcggagtggcgcgggtttaatgtgaagcctcgcgaggtgacgttgcctgtgttggtgtcgggtgttgacccggatccggtgggcgggtttcgtgacggttttttgaaagcgtatgacgagttgtggtctgcttttcctcctggcgaggagggggagttgtctgtgaagactcccgccggtgttgagcgtgtgttgaagtgtcggtttgattcggctgatgacacgtttacggtggatccggtgaatcgtggctatgcgcgttatgtgcttcatttgacagcttatgacccgttttggtatggggatgagcagaagtttcgtttcagtaacgcgaagttgcaggattggttgggtggcggccctgtcggcaagaagggtaccgcgtttcctgtggtgttgacgcctggtgtgggctcgggctgggataacctgtctaacaggggtgatgtgcctgcgtggcctgtgattcgtgtggaggggcctttggagtcgtggtctgtgcagattgatggtttgcgtgtgtcttcggactatcctgtcgaggagtatgattggatcactattgatacggatcctcgtaagcagtctgcgctactggatgggtttgaggatgtgatggatcgtttgacggagtgggagtttgcgcctattcctcctggcggttcgaagagtgtgaatattgagatggttggtttgggtgccattgttgtgtcggtgcagtacaggtttttgagggcttggtgaatggttgatggctggtcttgttccgcatgtaacattgtttacaccggattatcgtcgtgtggcgcctatcaatttttttgagtcgttgaagttgtcgttgaagtggaatggtttgtccactttggagttggtggtgtcgggtgatcattccaggcttgacgggttgactaagccgggtgcacggcttgtggttgattatggtggtggccagattttttctgggcctgtgcgtcgggttcatggtgtgggtccgtggcgttcttcgagggtgactatcacgtgtgaggatgatattcgtctgttgtggcgtatgctgatgtggcctgtgaattatcgtcctggtttggtgggttcggagtggcgtgctgaccgggattatgcccattattcgggtgcggctgagtcggtggctaagcaggtgttgggggataatgcttggcgttttccgcctggtttgtttatgaacgatgatgagagtcgtggccgctacattaaggattttcaggtgcggtttcacgtgtttgccgataaactgttgccggtgttgtcgtgggctcggatgactgtcacggtgaaccagtttgagaatgtgaagtttgatcagcgtggtttgctgtttgattgtgtgcctgttgtgacccggaagcatgtgttgactgccgagtctggttcgattgtgtcgtgggagtatgtgagggatgccccgaaggctacgtctgtggtggttggtggccgcggcgagggcaaggatcggctgttttgcgaggatgttgattcgatggccgaggatgactggtttgatcgtgtagaggtgtttaaggatgcccgtaacacggattctgaacatgtgcatcttattgatgaggctgagcgggtgctgtccgagttgggggccacgtcggggtttaagatcgagttggctgagtcggatgtgttgcgttttgggcccggtaatctgatgcccggggatttgatctatgtggatgtgggttctggcccgattgcggagattgttcggcagattgatgttgagtgtgtatcgcctggggatgggtggacgaaggtgacaccgattgccggggattatgaggataatccgtcggcgttgttggcgcggcgtgtggctggtttggctgcgggcgtgcgggatttgcaaaaattctaattgttaggggtttgttgtgggtattgtgtgtaaagggtttgatggtgtgttgaccgagtatgattgggctcaaatgtctggtctgatgggtaatatgccgtctgtgaagggcccggatgattttcgtgtcggcgctactgttcagggtgccacagtgttgtgtgaggttttgccggggcaggcttgggctcacggggtgatgtgcacgtcgaatagtgttgagacggtgacggggcagcttccgggcccggggaagccgcgattcgactatgtggtgttgtctcgggattgggagcagaatacggccaagttggagattgttcctgggggctcttctgagcgtgccagggatgtgttgcgtgccgagcctggcgtgtttcatcagcagttgttggcgactttggtgttgtcgtctgacgggttgcagcagcagctggataggcgtgctgtggcggcccgtgtggcgtttggcgagtcggctgcgtgtgatcctacccctgtggagggtgaccgtgtgatggtgccttcgggggctgtgtgggctaaccatgccggcgagtggatgctgttgtcccccaggattgagacgggttctaagcagatccagtttggtggttctgctgtgtatgcttacacgatcccgtttgagcagccgtttagtagtccgcctgttgtggtggcgtctatggctacggcggctgggggcacggcacagattgatgtgaaagcctacaatattactagcaaggattttggtttggcgtttattacgaatgatggttcgaagccttctggtgtgcctgcggtggctaattggattgctgtcggcgtgtgaccgggctgttgttgtggcggatggtgtgatgttggggggctgtggtgtcgtggtttactcctgcactggtggcctctatttgtaccgcgttggccacggttttgggttctgttcaggctgtcacatcccggtctaggaagcgtttacgcaggctgtctgcgcaggtggatgcgatggaagagtatacgtggggtgtgcggcgcgaggtgcgaaggtttaacgccgggcttcctgatgaggttgatccgcttgttttgcctgatccgcccggttttttgcaggattcgttggggggtgagtgatgagggagttggaggaagagaagcggcagcgccgctcgtttgagaaagcttccctgttgctgttgtttttgtcgcttgtgttgttggcggtggttgctgggggtgctttgcggtacgggtctgtggcttcgcaaagggattcggagcaggcgagggcccagtctaatggtacggcggctcggggtttagctagccgtgtgaagcaggcgtgtacttcgggtggggtggagtctgcgcggcttcaccggtctggcttgtgtgtggatgctgtgcgtgttgagcggagtgtgcagggtgtgccgggcccggccggtgagcgcggcccgcaaggccctgcaggggttgacggccgggatggtgttaatggttcggctgggctggttggccctgttggcccgcagggttccccgggtttgaatggtgtgaaaggtcctgacgggtggcctggtgcgaatggatcggatggccatgatggtgctccaggtcgtgcaggtgctgacggtgtgaacggggtgagcggcgctgatggtcgggatggttcggccggtgaacgcggtgatcagggtccttcaggtcctgccggcccgcaaggtgcacagggtgagcgcggacctgccggtgctgatggcacgaatggcaaggacggtaaggatggcgccgatggccgtgatgggcgttcggtgatatcggtgtactgttccgggggccgcctggctgtgaaatatagtgacggtacggcctccaccgtgtcgggttctgcggcctgcgagagtgtgaaaccgtcacctgtggttaccgtatcatcccataggtgaacaagacaagggaagggtgttactcatgttggttgtgtttggtggtggtgtgtggtgagatacattccagcggcgcatcactctgccggttcgaatagtccggtaaatagggttgtgattcatgcaacatgcccggatgtggggtttccgtccgcttcgcgtaagggtcgggcggtgtccacggcgaactattttgcttccccatcgtctggtggttcggcgcattatgtgtgcgatattggggagacggtgcagtgtctgtctgagtctacgattgggtggcatgccccgccgaatccgcattctttgggtatcgagatttgcgcggatgggggttcgcatgcctcgttccgtgtaccggggcatgcttacactcgtgagcagtggctggatcctagggtgtggcccgcggtggagagggctgccgtgttgtgtcggcagttgtgtgacaagcatggtgttccgaagaggaaactgtctgtggccgatttgaaggccggtaaacggggtgtttgcgggcatgtggatgtgacggatgcgtggcatcagtcggatcatgacgatccggggccgtggtttccgtgggacaaatttatggccgtagtcaacggcaaagatgagagtggggagttaacggtggctgatgtgaaagccttgcatgatcagattaaacagttgtcggcacaggtggcccagtcggtgaaccgtttgcatcatgatgttggtgtggttcaggttcagaatggtgatttgggtaagcgtgttgatgccttgtcgtgggtgaagaatcctgtgacggggaagctgtggcgcactaaggatgctttgtggagtgtctggtattacgtgttggagtgtcgcagccgtattgacaggctcgagtctgctgtcaacgatgtgaaaaagtgatggtggtttgttgtgggtaaacagttttggttaggtttgctggagcgggcggctaagacttttgtgcaaacgtttgttgctgtgttgggggtgacggcgggtgtcacgtatactgcggagtcgtttcgtggtttgccgtgggagtctgcgttgattacggctacggttgctgcggtgttgtcggttgctacctcgtttggtagcccgtcgtttgtggccggtaagcagaaaaccacggttgtggatgcgggtttggttccgccggatgatcctggaatagtggagtctcacatggtggatgtgtcggatcctggcatgatcgagcctgcagatgatgtggatcttggtgtaggctatgtgccgaaacatgctgccgagtcggaggttggcacggtagagtctactgttgcataagtgaatatagatgtgtgccccagcggtgctgccacggttgtgtggtggttgccgctggggcacactttttgtttatgcggtgtggctatgattcgttgctgtcgatggtgtcttcgagcatctggtacaggtggaggcaggtggagatggtttcgctggcctggtctagaacgttccggccgataacgtttttgtggttgtcgcggtggcggatgatcgcccacatgatctcgtcggctgccgcctgtaatagtttggcctggtatgcgattccggcgagccagtctagtgcttcctggcttgcgtaggggctcgggtcctcgctgttgtttgtggggtgtcctgcactgtcgcatagccacaggatttcgctgcactcgtctaacgtgtcctggtcgatagcgagatcgtcgaggctgacattgttgacggtaaggttcacgttgtcgagggagatgggtacaccgtactggttttcgacactgtcaacaatgttttgtagttgttgcatgttggtgggctgttgttggacgatacggtgtatagctgtgttgagggtggtgtaggtgatgttgtgtgtgttgtccatggtttttatgccattccttagttatcgtctggcatgtagtatgtgctgtttgcgtactcggtgagggtgatgagtgtttggtctgcccactgtttcacggtttgccgggtgactccgagtcgttgggcggctgtggcgtaggtttggtcgtatccgtatacttccctgaatgctgccaatctagctaaatgttttcgctgtttggatggctggcaggtgagggtgtagtcgtcgatggctagctgtagatcgatcatggtaacaatgttgttgccgtgatgttgtggcgcagttggtgggggcggcattcccggctccacgctcggtttccatgggccgccgttccagatccattgggcggcttggataatgtcggcggtggtgtaggttcggtccatgtgtcatcccctgaataggttgtcgaggttgtctggattgctggtgttgctggtgtcgaatcgtccgacgcagtggcagtagtcgtacatgagtttgatgatgtgttggtggtctcccaaataggtgtttccgctgatgctgtaggtggctgtgccgtctttcgcgatggtgtatttggcggtgatggtttcgggtgtttcggtgttggtgatgatggcggtggtggtggcgcctacggtttgtagcctggtggtttgtgttccgtcgtcgaggattgttgtgaccatggtgtgtgttctccctttgtgttagttgctggtttggttgtcggctagatgaataatatcggataaaggtttcggctggtcgaggtgttgtatggttttgttggctagccgtttggctaccctgtagcacattttggtgtagtgtttgttgtctaggttgtggtattgttcccgcaccgcaatatatagtagagagtcttggtacaggtcgtctgcgctgattgcggggtagtgtgcggctgttttggtgcatgcccggttgagtgtgcgtagatggtggtttgtggcccacacccacgatgcggtggtggctaggtctgcttttgttggtcgtctgctcatggcactattacctggctatctggtagttgtttggtgttttgttgttgatagtgtagcacactagtccggggtttccggtggtgcccgtcttgtgccggtaccatgtggattcgccttccatggatgggcattggatgaaggtgcgttgtccttgctcggagatttctaggtggtgtcggtgtccggccatgagaatatgagatgtggtgccgttgtggaattcttgtccgcgccaccaatcatagtgtttgccggtgcgccattggtggccgtgggcgtgcagtatccgtgtgcctgccacgtcgacggtggtggtcatttcgtctcggctggggaaatggaagtgtaggttggggtagttgttgttgagctggtaggcttctgcgatggcgcggcagcagtcgacgtcgaaggagtcgtcgtaggtggtgacgcctttgccgaagcgtacggcttctccgtggttgcctgggatggatgtgatggtcacgtttttgcagtggtcgaattggtggatgagttgcatcatggccatgcgggtgagcctgatttgttccgtcaagggtgtttgtgtgcgccaggcgttgttgcctccttgtgacacgtatccttcgatcatgtcgccgaggaaggcgatgtggactcgttcgggtttgcctgcctgttgccagtagtgtttagctgaggcgagggagcgcaggtagtcgtcggcgaagtgtgatgtttctccgccggggatgcctttgccgatttggaagtctcctgccccgatgacgaaggctgcggtgctgtggtcggtgcgggtgtcttgttcgggttttgggggtgtccattcggctagtttgttgacgagttcgtctacggggtaggggttggttgcgggttggtggtcgatgattttttgtatggatcggcctgtttctccgttcggtaaggtccattcggagatgcgtgtgcggcgcacggtgccgttggctagattgtcgtcgatggtgtcgatggcgttgtcgtggttggctagctgggtgaggagccggtctatgttgtctatcactgggcatcctcctcttcctcgtgtggggtggtgttggcttgtttgcggcgataatctttaataacggtggcggagatggggtatccggcttcagtgagttgttgtgctagccaggatgcggggatggttttgtcggcgagcacgtctgcagccttgttgccgtagcgttggatcagggtttcagttttggttgccatgatgtcctatcggttgtgtggttggttgccatcctgtgcggcagtcgccgtcgtgtcctggtttgcgggtgcaccacgatacggttccgtctgtgtggttgagtgttttgccgcacatgacgttttggagatgctccggcagcgcgccgtcaccttggttgctggtttgtgtgtcgaagagtgttttctggttggtgaaatgctctgacacggtgccgttgtgtacgggtagtatccatgttttccattgttgttgtagcctggtgttccagtggaattgtttggccgcgttttctgcctgttttaaggttttgtagtagccgactagtatgcgctggtgttcactgtcgggtgggttttggcctcgccagtattgtgccgccacggcgtaccggttgctggctgtgaagcgctgccagcagtattcaataatgtgttgcagtacactatcgggtatgttttgtgcttggttttcggtaagccacgcgtcgacaataatgttgcgtatagcttgcttgtctttggtggtgggtttgaacgagatgctcacagtacgggcctgtcgtcttgcatgaactggttgaaggtgttgttcccggcgtgttgggcttgtgtgatttgctggtcggtccaatctgggtgttgctgtttcagatagtgccagtggcacgcattgtaggtttcgttttgtagccgtgtgagatggttttcggtgatgatttgtttccacatggcccaggagacgtcgagccggttgaggatttctatggctggcacgttgaaggagttgaggaagaggatttcgtgggtgtagtagtttttctcgtaggcgtcccatccgcttcggtgcctgttgggctggtttttggggtaggcttcccggcagattttgtgtaaccgtttggccatgtcgtcgggtagtttaatgtcggggttggcgcggatcatggatcgcatcccatcataggtggtgccccaggtgtgcatgatgtaggtggggtcttcaccatcagcccatttttctgcacagatggcgaggcggatgcgccttctggctgtttggctggtgttgcgccggttggggatggggcacgtgtcgaggggatccatgatgttttagtgtacctttctggtttcgtgttgttgacgtgttttactgtagcacagtgtctagtgcttgtgtcaaccctgtttttccggcctgcaggtaggtgtctgtgacatccccgacagtgaggggcacgcgggtggcttgcgacagcgcggtttggatggtttgggccatctggtcgcctgccttgtctgggtcggaccagatgtagatgtggtcgtagccttcgaagaatttggtccaaaaggtttgccacgaggtggctccgggtagggctacggccggccatccgcattgttcgaggatcatggagtcgaattcgccttcgcaaatgtgtatttcggctgccggggtggccatggcggccatgttgtagatggagcctgtgtccccggcgggtgtcaaatatttggggtggttgtgggttttgcaatcatgctggagtgagcagcggaaacgcatttttcgtatttcggctggcccttcccagactgggtacatgtaggggatggtgatgcactggttgtagttttcgtggcctgggatggggtcattgtcgatgtatccaaggtggtggtagcgggctgtttcttcgctgatgcctcttgccgagagcaggtcgagtatgttttcgaggtgggtttcgtagagggctgaggctttctggattcggcggcgttccgcaatgttgtatgggcgtatgctgtcgtacattcgggttttcttcttctagtcgttgtttcagtttgtggaggcctcctccgataccgcatgtgtggcagtaccagacgcccttgtcgaggttgatgctcatggagggctggtggtcgtcgtggaacgggcagaggatgtgttgctcgttcctggacggattgtagcgtatccggtaggtgtcgaggaggcggcaggtgtcagaggtgtgggaggagctcgttgagggttgataccacataggcttcgctccatggcttgttgcgctgtttcatcactacgagtccgatagtggactggctttctcggtttcggtgtgtttcgtagttgcgtgcctcccggctggcttgtttcacgaattgggctagatggggctggcccgccttggcttcgataatgtaggttttgtggccggttgtgaggatgaggtcgccttcgtcttcgcggccgttgaggtggaggcgttcgatattgtgtccgatgtgacgtagctggtggaggagtcttgtttcccattcggctccggcccgccggttgcgtgcctgctgtgtggccatagttttttagagtcctttgtgtgttgtggtcatgttccagggctgtttttcgaccagaggtccgaagaatgtgtattcggggtatgctctgagtcgttcgtatcgggtgccgtcggggcttgatcggccggttctctgtttaagtacggcgatgcgtgcctctgccggtatcgtgaggccgttgccgttgtcttcgccaccatacaatgagactcccaatatgagttgtggtttttcggagaggccgtttttgatttccctccgtgctggggggtgttcaatgtcggagccggttttgtcggtggcgtggtgggtgacaataatggtggatccggtgtcgcggcctaatgctgtgatccattgcatggcttcttgctgtgcctggtagtcactctcgcagtcttggatgtccatcaggttgtcgataacaatgatgggggggaaggtgttccacatttccatgtaggcttgcaattccatggtgatgtctgtccatgtgatgggtgactggaatgagaatgtgatgtgcgcgccgtggtggatgctgtctcgatagtattctggcccgtagtcgtcgatgttgtgttgtatctgtgtggtggtgtgttgggtgttgagtgagatgattcgtgtggaggcctcccagggtgtcatgtcccctgatatgtagagggcgggctggttgagcatggcggtgatgaacatggctagccctgatttttggctgccggaccgccccgcgatcatgaccaaatcccctttgtggatgtgcatgtcctggttgcggtagaggggttctagctggggtatgcggggcagttcggcggctgtttgggaggctctctcgaaggatctttggagagagagcatcggaaccttaatctatctgttggttgtgttttgatggtcagatggagtcgatatcgatgtcagtagaggctgtggtgtcgtctagctggccgttatcgcgcttgtctacgtattcggcaaccttatcgtagatggcgtcgtcgaggggtttgagcacgacagcgttgaacccgtttttggtgcgcacggtggcgagtttgaaggcctgctcttcgcccaggtaggtttctagatcgcggatcatggagtgtgggcggtcgttgttgccgcgtgctttctcaataatagcgttggggatggtttctggggtgccgttgttgagatcctggagggtgtggaagattgtgacatcggcgtaaatacggtcggcgacctgtccgccgtagccttcggtgttgtgttctacgtcgcgcactttgaaggcgatggcggtggcgtcctggtttttggacgggttgaagaaggtgctgttgctgttgtttcggtagtttgcgagtcccattgttgtttcctttactgttttgttggtttgtttgttggttttatcgggtgaggctgtttcgtttgctgcggaaagcctccgacacgtcactgttgctggtgatggtcttcttgtactgtttgaggagatctgctagctgtgtcttgctggtggctttgttgatccggtcaatgatgatgtcgttttcctggttggcgattttgttgacgtagtctttggcggctttatcgtatcggtcttgaagcaggattgctgcgctggcgatgagggttgcgaggtcccagtctttggatacggtttcgtctttcaatcctcctagcagatcaatgatggattgtttgatgtcttctgcggtgtctcctcggatgactgtccatggggcagcatagtctccaccatatttgagtgtgatagtgagtcgatcattgtctgtggtgtgctcgtcggtcacgtgttttccttttctttattgtctgtttggggtggctgtacggtggtttctaccgggtatctgtaggcgtctttcccgtctacagcccagcaggcgtccttgacggggcatcctttacagagtgctgtgacgtggggtacgaagatgccttgactgattcctttcatggcttgactgtacatggatgatacatgccggtaggtgttgttgtcaaggtcgtagagttcggtggatgtgccttgtgtcggggacttgtcgtcgttgcggctggtggctggcgtccaaaacatgcctttcgtcacatggatgtcgtgttgttctagcatgtaccggtatgtgtgcagctgcatactgtcggctggtaggcgtcctgttttgaggtcgaggatgaaggtttcgccggtgtcggtgttggtgaagatgcggtcgatgtagccaacgatctgggtgccgtcttggagggtggtttctaccgggtattcgatgcctggctggccgtcaataacagcggtgatgtattctgggtggttgtgcctccatgttttccacctgtccacaaaggtggggccgtatatcatccaccaattgtagtcttttttgtgtggcccgcctgactcgcacatgtttttgcacaccctgccggagggtttgatgtttgtgccttcggattcggcgagggcgatttgggtgtcgaaaatgtttgtgaaggatgagagtttgtctggcagttcagggtattcggcgggattgtacaggtgtaggtcgtattgttcggtgatgtggtgtatggcgcttccggcgatggtggcgtaccaggtgtggtgttgggtgtggtagccgtgggatagccgccatttttcaccacattcagcccactgtgacagtgatgagtaggagatgtggcctggattgtggatggttttcgggtattgtgctagaggcattacttgtcgcctttgtgggtgttccatgggttgcgggtgtcttgtccggcattgtgttgctggtaggcgaggagtgcgaggcagtgccaggcagcatgggccaggtggggtagcccggactcgtggtcgaggttgttgccttgctgccatgatagcaggtgcctgtagagggcgtcaacgctgtggctccacggatagccgccggtccagttgttgtcgccgtatttagtggcgccgtatccggccacggagcctagggcgtgaagggatgtggggtcgatgagggatagcctgcaaagtttcaattcttttcgggcaccagtgtcagggtcggtgtacatgctggttggctcatccatggggtgtgtgctccttaagtatggggttactggttggggttgtgggctagggcgacggcgagaataatgatggcgagggtttcagcgatcagtatgggtgttgtgatcatttggtgtctcggggattgttggtgagtgtggatgcacccaggagggtggtgagggcgcatgcggcgatgatggcgagggctgccttgtggctggtgccggttgcgtacatccatgtgatgatggcgccctggatccaggctagtgtggtgaagaacgtttcgtagctgtgtagctcaatgttgttgggtgtgttcatgcttgctcctgaagaatggtgttgatggttttgtaaatgttgtacaggtcggcttcgatggtttgtagctgtttgatttggtggtcgagattgatgtccgggttgagggtgttgatgcgggaggcgatgtcggtggctgtgcggagtgtgccgccggtgtggtgaatgatgtgtgccgtgtcggcgagtccggtggtgacggcgtagtgggagaggagaggcatagcggggggtgctccttggcgggttactgttgcgggttgatgttgaggtcggtgacgttggggtgttcttctgttccggtgacgaggcagtggacggtgactgggagtttggatgctcccggctggcggacggtggcgccgtagacgatagtaaaggtgtctttgccaataattttgtggagttggaggtcgatgtcggggttgccgttccacttgacaccttgcgctgcagccatctgctcagccttgtcgttgcaggcgtgtgcggcggtgatcatggtgagaccctgtgaggtttcttcaccgcgtgtttgggcttgccggtgggctttggcctgctcggcttgtagggagcggactgctgcggcctggcgggctttcttttcggctttgcgctgttgaacggttttgggtgtccattcggtgttggctgtggtggcctgcggggctggctgtgaggcgagtggcgggttgtcgcctggtgccgggaggaaggatgctgcggcgatgatgacgactgtggcgccggcgatggtgtagcctgttttcttgttcatggctttgtgttcccctttccggggtgttgttcgttgctgacatgatcaatactttcagcggctggacccactgtcaagtgtgcgctcagtttgtgtgagcgtttcttgtgtggctaggggtgatggcttctttcgcccaataggatgtgccaccgctggtccagtatccgagtttgttgcgctgcatgcccttggcgtccatctcgtcgatagtgaggcacctgcgacgatctggaccctccttgactccatgatcgcctacccggtgcatgtcgcctgaggtggtactcgtgaatgtttcgtggcagattgtgcagtgctctggcttgtatccgatgattgtgttatcgcacttgtggcatgtccattgcatgattgctcctattttccattataagacttcctgtagtgccattttagcgccttgcgagtcttgggggtacaactatataggtcaggtatttctaggcgattctaggctcattgtgtgtggctgggggttatcgggcacacagggtgaggagttggcccacattgatgcgggtcacattccagtagagttgcgtcgcctcatccgcggtgagcggcttccactcgttgtggctgaacacggtgccatcggatgcgatgaacgtgttggggcgtagcttgtgaagctcagtctctacatgctgccggtaggcttcggcgaggccctcaaaatccaggtggtcgcaggtgaggttttcaaggcgtgtcaggtcgaaaggctccgggcagtccggggtgggggtgtagagctgggtgaagtggttggcgatcttttgcataatgatgtccttttcgttgctgataacgttgttgagggtttatcgggtggatgctttgaggatggcgtccacatcgatcatgtcgatgagatcgtggagttcctcagcctcatccactgtgagtggctgccagccgggtgtcccgtatagggcgccgtcgagggtgacagtccacaggggccggatgagccggatggcttcttcgactttagcgtggtacatgcggcgcaccatatccagatcgatgtcgtctgaatggtctccggtgaggctgtggaggctggtgaaggatggtgtgatgagtgtgccatccatgagggggtgctcctttcgatggtgtagtggttgttgtggtttctagagtgtgtaggttgcgaccccactgtcaaggtggcgctcatttggattgagcgtttcatggaaggtgacgaatgttactgaagccttgatggcctctctcagcgcctaaaatcttctaggggtaggattatgcagggttggccctgctgatcgattctaggggccttctagggcgtctcaggggtatgtctgggtgatagcaggtccggtagatgacccggcagatctaccttggctttcatcacgggggtcgagatgccatatctgggcatggaatctaaaccctcatactgtgtgagatgtatcacactcgcctagtatggtgtgcactctcgggatcactctgccgatctagcgtggagggtgtagcccagaaatgccgtttaaagccttcgcacggcgcctaggagcgccttacagggtggaggctaggtattcatacccccaagcaattctgatcgattctagacgcctcccaccgcctcatacacgatcaaccctctcggtatagaccatcagcccctatcctggttagctaagcctcaactatgtggacagtgtgggatgctaagagggaagaaggacacggtaaaagaaagaggggggagcatcagccttcacgccttaagatcttagcgcttagcaccgatggtcttagcagttagcaccgagccccctcaagggctcggcatcagcctcatcaggctcagcccgaacaggcacagcactgaaaagggtacacgccatcagggaaggcttgagagtacgaggagccctagcgacgagtactcgaaagcctgagggaacaccctcagcactgatgggcctagcgtgttcggaaagaacacaagagtcaagtgtgacagctgtccgggagtgaaacccgttccaactaggtgtttcagcctgaatcaccctcaaaggttacaagactctaagaaaatttaaggaaaagtttaggtttaatttttggacctttactaccaaaaacacccgtttacacccctcaaacccgcctatagagccaaatccaccagtttgactcatcccaggtggggtatgataggctggacaggtagccagctggacgcaaggccggaaagtgctaacgcacttcccaacctcgcttaccatcagtctaccaaacacttaaagacctaagggcttagcgctaaggtgctgatagcttaacaccgagcccctcaagggctcggcatcagtctttaagccttaaacacttaaagtacatataaaactttaacagttaaacgttaaaagctttaaaccttaacacctaagttaagtataaaaccttaaaggctaagcacttaaggatataaactttacatcagtgtttaagactttacagcttaaagtaaatattaatacttaaaaccttaaagctttaaacacttaaaataactataaaacattaaagaccttaagtacttaaagttaaccatcagtcttaaactttaatattatacctataagtcttaaagcttataggtataataatataatataagtattaaagcttataagttataaaagtttttagaagagctaaggggttaacttctttacttctctactctctttggttctttctctcttctcttcttttcttcatcaggggagaagaggaacctttaaccgtcaacgctgatggactttcaaccgtgtgactcgtgtaccaccggtcgcacgctcccggtttgtacactccccacacttactctacctgtgtccctttcaggcttagcgtgttcggctgaaggcgtacggcgtgtcacgcttaaacccttaacaccaggtaagacttaaagtgtatattataagtagaagactttaaaaccttaagggtgttcccgctgagcctgtgtcctttaacgctaggcgctaagctgtgaaacgtgaacacccattcacccccttttttctttcgtgtccttcttcttttgacacagctggggggcgatgtgatctttttcacatccatgggggtagtggagaaaagcaaacaccccaccatcaacagaacaccccctcaaacgaacaaaacagggcccaggatcgaacagcagggcaccggtagagtaaacatacccccaacacgttccaggctgttacaggggcaatgagaggccatacagggctaggcgaggagttgatgcgtgatggcacacaccaaccgcaccgcatcctccgcccaccggcgctggcgggcaagactcatcacccaagcccgacaacaaggccaaaccgaatgcccactctgcggaatccagatagcctggggcacacaccagctgccaaccagccccgaagccgaccacatcacacccgtcagcaggggaggactcaacaccctcgacaacgggcaaatcatctgcagaacatgcaacagaagcaaaggcaatcgcagcgaaccaaacattagtttccaacaacaaaccacaaaaaccctgatcccatggtgaaaaaatccacaaaccccacgggaaccaccccctgcacacccgtgcaagaccagatgaagaagttgtgtgagggtgatggtggggctggtaa

SEQ ID NO: 15 - DNA, 29568 bp, Propionibacterium acnes bacteriophage
ctccagcatgaaacgctcaatccgattgagcgtagccttgactgtgaggtcgcagcacgcacactctagaaaccacaacaacccctacaccaccgaaaggagcacacccatggatggcacactcatcaccccatccttcacatccctctacaggcagacagaaatcgacccgctcagcctccacagcctcaccggaaaccattcagacgacatcgatctcgatatggcgcgccgcatgtaccacgctaaagtacaagaagccatacgactcatccggccactgtggacggtcaccctcgacggcgccgtgtacggcgactacgactggcgccacctctccgagaacgaagctgaggaactccacgatctcatcgacatgatcgacgtagacgccatccttgtcgcatccacccgataaaccctcaacaacgttataagcaacgaaaaggaaataatcatgcaaaagatcgccaaccacttcacccagctctacaccccagccagctacgactgccccacacccttcgacctgacacgcctcgaacacctctcctgcgaccacatggattttgagggcctcgccgaagcctaccggcagagcgtggaagccgaaatccacaagctacgccccgacacattcatcgcatccgatggcaccgtgttcagccacaacgagtggaagccgctcactggtggtgaagccacgcaactctactggaatgtgagccgcatcaatgttggccatctactcaccctgtgcgcccgataaaacccctagccacataagtatcgctcacaatcgttgagcgcagccttgacatagggaaccgcccacaccatgattaatcatgtcagcaacgaacaacaccccggaaaggggacaacagtcatgaacaagaaaaaaggctacaccatcgccggaatcacagccgccatcattgccgccgcctcattcatgccagccccagacgacaatccgccactcgcatcacagcccgccccgcaagccaccacagccaacaccgaatggacccccaagactacccaacagcgcaaagccgagaaagcggcacggcaggcagccgcagaacagtcactgcgagccgagcaggccaaaacccacaagcaagcccaagcaagaggtgaagaaaccgcaaccggactcaccatgattacggcagcacacacctgcaaccgtaaagccgaacaacaggccgccgcacacggtgtcaactggaacggcaaccccgacatcgacctccaactccacaaaattattggtaaagacaccttctccatcgtctacggcgcaaccgcgaaacagcccggcgcatccaaactacccgtcaccgtccactgcctcgtcaccggaaccgaaaactcaccccacgtcaccgacctcaacatcaacccgcaacactaacccgccaaggaccgctatgcctctcctctcccactatgctgtcaccaccggactcgccgacaccgcacatatcattcaccacactggcggcacactacgcacagccaccgacatcgcatcccgcatcaacaccctcaacccagacatcaacctcgaccaccaaatcaaccaactgttatctatcgaaacagatctgtacaacatttataaaaccatcaacaccattcttcaggagcaagcatgaacacacccaacaacatcgagttgcacagttacgaaacgttcttcaccagcctagcctggatccaaggcgccatcatcacatggatgtacgccaccggcaccagccacaaagccgccctcgccatcatcgccgcatgcgtcctcgcatcgcttctaggtgcatcaaccctcacctacaatccccacaacaccaaatgatcacaacacccatacttattgctgaaaccctcgccatcattattctcgccgtagccctagcccacaacaacaaccagtaaccaaccccctaaggagcacaccccatggaccagcccaccagcatgtacaccgacccaaacaccggagcccgaaaagaattgaaactgtgcaggctctccctcatcgaccccgcatccctccactcgctcggcgaagtagccggatacggcgccaccaaatacggcgacaacaactggaccggaggatacccgtggagccacagtgttgacgccctctataggcacctgctagcctggcagcaaggacacaacctcgacgatgaatcagggctaccccacctggcacacgccgcctggcactgcctcgcactcctcgcctaccagcagcatgacaccggattagacacccgcaacccatggaacaaaaacaactaacatgcctctagcacaacacccgaaaaccatcaaccatccaggccacatctcctacagttctctgtcccagtgggccgaatgcggagaaaaatggcgcctatcccacggctaccatgcacaacaccacacctggtacgccaccatcgccggcagtgctatacaccacatcaccgaacaatacgacctccacctgtacaatcccgcagaataccccgaaatacccgataaactctcatccttcaacaatgttttcgacacccaaatcgccctagtcaaagaagagggcacccaaatcaaaccctccggcagagtgtgcaaaaacatgtgcgaaaccggaggccccaacaaaaaagactacgactggtggatgcactatggccccatcttcgtcgacaggtggaaacagtggcgcacaaaccatccacaataccacaccgcggttttggacggccagccaggcatcgaatatccagtcgaaaccacactccaggacggcaccaagattgttggctacatcgaccgtgtcttcaccgacaccaacaccggcgaaacattcatcctcgacctcaaaaccggtcgactgccggttgatgctatgcagttgcatacctaccggtacatgctcgcccagaatggcatccaggtgacgaaaggcatgttttggacccccgccaccagccgcactaacaccacatcgccaaccgggggcacagccaccgaactgtacgatcttgacaacaacacctaccggcatgtatcatccatgtacagtcaagcaatgaaaggaatcagcgaaggcatcttcgtcccccatgtcaccacaatgtgtaaaggatgccccgtacgggacgcatgctgggccgtcaacgggaaagacgcctacaggtacccgatccaaaccaccatcacaccaccgacagagaaagatgaggagaaccagtgaccgataccaacagcagtggtgatgaccgtatcaccgtcacactcaaatacggcggcgactatgcagccccgtgggcggtcatccgcggagacaccacagacgacatcaaacaatccattattgacctgctaggcggactcaaagacaacaccgtctctaaagactgggatctcgcaaccctgatcgcgagcgcatccattattctccaagaccgatacgatcaggccgccaaaaactatgtagacaacatcgcatcccaagaaaacaccatcgtcatcgacaaaatcagcaacgcaaccagcaagacacagctagccgaccttttgaaacagtacaaaaagattattaccagtaaccctgacgtgtccgaggccttccgcagcaaacgcaacagcctcacccgataaaaaccaacaaaaccaaacataaacagtaaaaggaaaacagttatgggactcgcaaactaccgcaataacaacgacagcaccttcttcaacccgtccaaaaatcaggacgccaccgccatcgccttcaaagtccacgacgtgcagcacaacactgaaggctacggcggacagaccgcagaccgcatctacgctgatgtgaccatcttccacaccctagatgatctcaacaacggcaccccagaaaccatccccaacgctatcattgagaaagcgcgaggcaacaacgaccggccacactccatgatccgcgaactcgaaacctacctgggagaagagcaggccttcaaactagccactgtgcgcaccaaaaacgggttcaacgccgttattctcaaaccattggatgacgccatctacgacctcgtagcagcatatgttgacaagcgagacagccagcccaacaccacgggcagtgatgatgtggacatcgactccatctgaccaccactctccgcccaaaccgtaacagatagataaggttccgatgctctctctccaacgatccttcgagagagcctcccaaaccgcagccgagctgccccgtataccacaactagaacccctctaccgcaaccaggacatgcacatccacaaaggggatctcgtcatgattgcggggcgctccggcagccaaaaatccgggctagccatgttcatcaccgccatgctcaaccagcccgccctctatatatcgggggatatgacaccctgggaggcctctacacgaatcatctcactcaacacccaacacaccaccacacagatacaacaaaacatcgacgactacgggccagaatactatcgagacagcatccaccacggccaacacatcacattctcgttccagtcacccatcacatggacagacatcaccatggaattgcaagcctacatggaaatgtggaacaccttcccgcccatcattgttatcgacaacctgatggacatccaagactgcgagagtgactatcaggcacagcaagaagccatgcaatggatcacagcgctaggccgcgacacaggatccaccattattgtcacacaccacgcaaccgacaaaaccggaaccgacatcgaacacccgccagcacggcgagaaatcaaaaacggcctctccgaaaaaccacaactcatcctcggagtctcattgtatagtggcgaggataacggcaacgggctatcgataccagccgaggcacgcatcgccgtcctcaaacagcgcacaggcaaatccagcccagacggaacccgatacgaaagactgcgagcctaccccgaatacacattcttcgggccactcgccgaaaaacagccctggaacatgaccacaacccacaaaggactatgatggcgacacaacagtcacgcaaccggcgggccggagccgaatgggaaacaagactcctccaccagctacgcaacaccggacacaatatcgaacgcctccacctcaacggccgcgaagacgaaggcgacctcatcctcacaaccggccataaaacctacattatcgaggctaaagccgggcaaccacacctcgccgaattcgtgaaacaagccagcagggaggcacgcaactacgaaacacaccgaaacaaacaaaacaattccaccatcggactcgtagtgatgaaacagcgcaacaagccatggagcgaagcctatgtggtatcaaccctcaacgagctcctcccacacctctgacacccgccgcctcctcgacgcccaccggatccgctacaacccgtccaggaacgagcaacacatcctctgcccgttccacgacgaccaccagccctccatgagcatcaacctcgacaagggcgtctggtactgccacacatgcggtgtcggaggcggactcgccaaactacaacaacgattagaagaaagaaacccgaatgtacgacagcatacgcccatacaacattgcggaacgccgccgaatccagaaagcctcggccctctacgaaacccacctcgaaaacatactcgacctgctctcagcaagaggcatcagcgaagaaacagcccgctaccaccaccttggatacatcgacaatgaccccataccaggccacgaaaactacaaccagtgcatcaccatcccctacatttaccccgtttggggcggcccagccgaaatacgaaaaatgcgtttccgctgctcactcccacacgattgtaaagaacacaaccaccccaaatacctaaccccagccggagacacaggctccatctacaacatggccgccatggccaacccggcatccgaaatgcacatttgcgaaggcgaattcgactccctgatcttggaacaatgcggatggccagccgtcgccctacccggcgcaacctcgtggcaaaacttttggaccaaattcttcgaaggctacgaccatgtttacatctggtctgatccggaccctgcaggccaccagatggcacaaaccatccaggcagcgctcccccaagccacccatgtgcccctcaccctcggggatgtcacagacacctacctacaggaaggaaaaacagggttgacacaagcactagacactgtgctacagtaaaaccacataagcaacccaaacaaagaaaggcatataaaacaccatggatcccctcgacacgtgccccatccccggccgccgcaacaccagccaagcagccaggaggcgtatccgcctcgccatctgtgcagaaaaatgggccgacggagaaaacccactacatatcatgcacacctggggcacaacctatgatgggatgcgatccatgatccgcgccaaccccgacattaaactacccgacgacatggccaaacatttgcacaaagtatgccgggaagcctaccccaaaaaccagcccaacaggcaccgaagcggatgggacgcctacgagaaaaactactacacccacgaaatcctgttcctcaaccaattcaacatcccagccctcgaaatcctaaaccggctcgacgtgtcatggaccatgtggaaacaaatcatcaccgaaaaccatctcacccggctacaagacgaaacctacaatgcgtgccactggtattatctgaaacagcaacaccccgactggaccgaccagcaaatcacacaagcccaatacgccgggaacaacaccttcaaccagttcatgcaagacgacaggcccgtactgtgagcatcgcattcaaacccaccaccaaagacaagcaagccatacgcaacatcattgtcgacgcgtggctcgacgaaaaccaagtacgagacatgcccgacaaggtactatcacacatggtggaatactgctgggggcgcttcacagacaacaacaggtacgctgtagctgcccaatatttgaaagggccacacaagcccgatagcgaccatcaacggatcattgtaggctacttcaaaaccatcaaacaagccacgaacgcagcaaaacaattccactggaacacccggctacaacaacaatggaaaacatggatactcccagtccacaactgcaccgtgtccgagtttttcacccaacaaaaaactttgctagacgagcaaaacgatagcaatagcgagctgccggagcatctacaaaacgtcatgtgcggcaaaacactccaccacacagacggaaccgtatcgtggtgcacccgcaaaccaggacacgacggcgactgccgcacaggatggcagcccaccacacaaccgataggatatcatggcaaccaaaactgaaacccttattcaacgctacggcaacaaagctgcagacgtgctcgccgacaaaaccatccccgcctcatggctagcaaaacagctcacccaggcaggataccccatctccgccaccgtgatcaaagactaccgccgcaaacaaaccaacaccacccagaaaacagaagaggatatccgatgatagacaatatagaccggctcctcacacagctagccaaccacgacaacgccatcgacaccattaacgatgatctcgccaacggaaccgtacgccgcacacgcatctccgaatggacactccccaacggagaaacaggccgatcaatccaaaaaatcatcgaccaccaacccgcaacaaacccctaccctatagacgaactcgtcaataaactagccgaatggcagccaccaaaacccgaacaggacacccacaccgactacagcactgcagccttcgtcatcggggcaggagacttccaaatcggcaaaggcatccccggcggagaaaccagccgattcgcagacgactacctacactccctcacatccgccaaacactactggcagcaagcaggcaaacccgaacgagtccacatcgccttcctcggcgacatgatcgaaggatacgtgtcacaaggaggcaacaacgcctggcgaacacaaacacccttgacggaacaaatcagactcacccgcatggccatgatgcaactcgtccacatgttcgaccactgcgccaacgtcaccgtcacatccatccccggcaaccacggagaagcagtacgattcggcaaaggcgtcaccacctacgatgactccttcgatgtggactgctgccgggccatcgcagaagcctaccaactcaacaaccaatatcccaacctacacttccacttccccagccgggacgaaatgaccaccaccgtcgacgtggcaggaacccgaatccttcacgcccacggacaccaatggcgcaacaaccaacactacgaatggtggcgcggccaagaattccacaacggcaccacatcccacatactcatggccggtcaccggcaccacctcgaaatctccgagcaaggacaacgcacattcatccaatgcccatccatggaaggagaatcagtctggtaccgacacaggacaggcgccaccggcaaccccggactcgtgtgctacactatcaacaacaaaacaccaaacaactaccagatagcccgatagaatagatgccatgagtagacgaccaaccaaagcagacctagccaccacagccgattggggatggaccacaccagcccaccaacaccagctacacaaagcctgcaccaatattgcccgccgctacccgactgtcaacccagacgacctgtaccaagactctctactatatattgcggtgcgcaaccaataccaccagctcacaggcaaccagtggacccaaatgtgctaccgtgtagccaaacgactagccaacaaaaccatccaacacctagatctacccaaaccggtgcaagaaataaccgctctagcagacaaccaaaccagcaactaaaggagaaaccccaatggttaaaaccatcctcgacgacggcacccaaaccaccatcctccaaaccgtaggcaccaccaccaccgccatcatcaccaacaccgaaacacccgaaaccatcaccgccaaatacaccatctctaaagacggcacagccacctacagcatcagcggcaacacctacctcggcgaccaccaacacattattaaactcatgtacgactactgccactgcgtcggacgcttcgacaccaccaacaccagcaacccagacaacctcgacaacctattcagggggtgacacatgaaccacacctacaccaccgctgatattatccaagcagcccaatggatctggaacggcggcccatggaaaccctcagtagaacccggcatgccacccccaccaaccgccccccaacaccacggcaacaacatagttagcatgatcgacctacagctagccatcgacgactacaccctcacatgtgaaccatccaaacagcgaaaacacctggcacggctggcagcattcagggaagtatacggctacgaccaaacctacgccacagcagcccaacgattaggcgtcacccggcaaaccgtgaaacagtgggcagaccagacactgatcacactcacccaatacgccaacaccaccagcaacaccggctacgatgaagaggaatagaaacaatgcccagcaacagacaacgaacagtcacagccctcacagccgcggcccgccgcatcgtacagcagcagccacgaaacatgacagaactcgcaaacattacctgcagtatcagcagcgaatacctggttcccatccacttcgacaacatcagcctcaacgccaacggtgtcagcctagacgatattgatatggacgcagacaccagggacgcatgccaagaaacactgtggaactgcaaccttgcagaacacccggacaacaacaagccggcctgtcaggcggccctagacgagctggcatgcctctctaaccaggccctaacactacaaatcatggcaaacaacattatcgaggccatctacaatcaccgcgacaactatcccggcatcattcaacgaaacattgtcgaccaggctgaaaacaccctcgccgaatgcgcactcctacagcagacactcgaagataccctagacgacaacctgtaaaacccctgtagacacaaaaatagtgccccagcggtgcttccacgtgttgtggtggcggctgctggggcactattttatcaatattcacttatcacacaacaggatcagaccctatcgtgccaacctccgactctgctgcacgcctcggcgcatagtccaaattctcatcatccataggctctatcatgccaggatccgacacatcaaccatgtgagactccactattccaggatcatcgggtgaaacaagcccaacatcaacaggcgcaacctttggtttacccgccacaaacgacggattaccaaacgacgtagctatagacagcacagccgcaaccgacgcagtaatcaaagctgattcccacggcaaaccccgaaaagactcagccgtataggtgactcccgcagtcacaccgagcacggcaacaaacgtttgaataaaagttttcagggcacgctccaacaagcccaaccaaaactgtttacccacaacaaaccaccatcacttttttaaaccgttaacagcagactcaagcctgtcaatacggctacgacactccagcacgtaataccagacactccacagggcgtccttggtgcgccacagcttcccggtcaccggattcttcacccacgacagggcatccacacgcttacccaggtcaccattctgcacctgcactacaccaacatcgtggtgcagcttattcaccgaaccggcaagctgcgcagacaattgtttaatctgatcatgcaaggctttcacatcagccacagttaactccccactctcattgtgaccgttgacaacggccataaacctgtcccacggaaaccacggccccggatcgtcatgatccgactgatgccacgcatccgtaacatccacatgcccgcacacaccccgcctgccagccttcaaatcggctgcactaagcttcctctttggaacattatatttgtcacacaaacgtctacacaggatggcagccttctccaccgcaggccacacgcgaggatccagccactgctccctcgtgtaagcatgccctggcacccggaacgaggcgtgcgaacccccatcggcgcaaatctctatacccaggctgtgcggattaggcggggcatgccagccaatagtgccctcggacaggcactgcaccgtctccccaatatcacacacataatgagccgaaccccccgatgatggggaagcaaaatagtttgctgtagaaacagcacgccctttacgggaggcggacggaaaccccacatccgggcatgtcgcatgaatcacaaccctattcaccggatgattagagccggccgaatggtgcgctgctggaatgtatctcaccgcacaccaccccccaaaaacattatcaacactagtagcacccttccctcttcatattatttgtgggatgatacagtcacgataggcgacggggccaccgttttgcaggccaccgagcccgatatcgtggaagccacaccgtcactatatttcacaaacaggcgccccccagaacagtacacagacaccaccgagcggccatccttaccgtctttaccatcagatccgttcgcaccggcggggccttgctcaccccgttcaccctgtgtaccttggggcccttcaggtcctgaagggcccacagcaccgcgctcaccggccgaaccatcccgaccatcagcgccgtcaacgccgttcacaccatcagcacctgcacggccagcaacaccatcatggccatccgacccgttagcaccaggcaacccgtcaggacctttcacaccattcaaaccaggagaaccctgcggaccaacagggccaaccagcccagccgaaccattcacgccatcacggccatcagcaccggcagggccctgcgggccacgctcaccggcagggccaggcacaccctgaacgctccgctcggtacgcacagcatccacacacaaaccagaccggtgaagacgcacagactcctggccgccctcagcacacacccgcttaacgcgggcagccaaacccttggcagctgtaccatttgactcagccctggcctgctccgaatccctttgggaagccacagagccgaaacgcaaagcacccccagcaaccaccaccaacagtacaagcgacaaaaacagcaacaccatagaagccttctcaaacgagcggcgctgccgcttctcctcctccaactccctcatcattcaccccccaacgaatcctgcaaaaaaccgggcggatcaggcaacaccaacggatcaaccccatcaggaagccgtgaattgaaccggcgaacctcacgccgcacaccccacgtgtactcttccatcgcatccacctgcgcagacagcctgcgtaaacgcttcctagatttagacgtaaccgcctgaaccgaacccaaaacagtagccaacgcggtacaaatagaggccaccagtgcaggagtaaaccacgacaccacagcccccccaacatcacaccaccattaaacaacacaccgtcaacaatttacacgccgacagcaatccagttcgctaccgcaggaacattcttcggcttcgaattatcattcgtgataaacgccaaaccaaaatccttattagtaatattgtaggccttcacatcaatctgctgcgtacccccagccgccgtagccatagacgccaccacaacaggcggactactgaactggcgatcaaacgggatcgtgtaagcatacacagcagacccgccaaacatgatcgacttagcacccgtctcgatcctgggggacaacagcatccactcgccggcatgattagcccacacagcccccgaaggaaccataacccggtcaccctccaccggggtaggatcacacgcagcagactcgccaaacgccaccctagccgctatagcacgcctatccaactgctgctgcaacccgttagacgacaacaccaaagtcgccaacaactgctgatgaaacacgccaggctcggcacgcaacacatccctggcacgctccgcacggccaccgggaacaatctccaacttggccgtattctgctcccaatcccgagacaacaccacatagtcgtatcgggtctcacccgggcccggaagctgccccgtcaccgtctcaacactattcgacgtgcacatcaccccatgagcccaagcctgccccggcaaaacactacacaacactgtggcaccctgaatagtcgtaccgacacgaaaatcgtccgggcccttcacggacggcatattacccatcagaccagacatttgagcccaatcatactcggtcaacacaccatcaaaacccttgcacacaatacccacaacaaacccctaacaattagaatttttgcaaatcccgcacaccggcagccaaaccggcaacacggcgagccaacagggccgacggattatcctcataatcccccgcaataggagtcaccttcgtccacccgtcaccaggcgaatcacactccacatcaatctgccgcacaatctccgcaatagggccagaacccacatcaacatagatcaaatccccaggcatcagattgcctggcccaaaccgcaacacatccgactcagccaactcgatcttaaaccccgacgtggcccctaactcggacagcacctgctcagcctcatcgatgagatgcacatgttcagaatccgtgttacgggcatccttaaacacctcgacacgatcaaaccagtcatcctcggccatcgaatcaacatcctcgcaaaacagccgatctttgccctcgccgcggccaccaaccaccaccgaagtcgccttcggggcgtcacgcacatactcccacgacacaatcgaacccgactcggcagtcaaaacatgtttacgagtcaccgcaggcacacaatcaaacaccaaaccccgctgatcattcaccttatcctcaaactggttcaccgaaacagtcatccgataatacgacaacaccggcaacaacttgtcagcaaacacatgaaaccgggcctgaaaatccttaatgaaacggccgcgactctcatcatcttccataaacaaatccggcggaaaccgccaagcattatcccccaacacctgcttagccaccgactctgccgcaccagaatagtgggcataatccctgtccgcacgccactcagaccccaccaaaccaggacgataattcacaggccacatcaacatacgccacaacaggcgaatatcatcctcacacgtgacagtcaccctagaagaccgccaaggcccaacaccatgtactttacgcaccggtccagaaaaaatctggccgccaccataatcaacaaccagccgtgcacccggcttcgtcaaaccgtcaagcctagaatgatcacccgacaccaccaactccagcgtcgacaaaccattccacttcaacgacagtttcagcgactcaaaaaaattgataggcgccacacgacgataatccggtgtaaacaatgttatctgcgggacaagaccagtcacaacaattcaccaagccctcaaaaacctgtactgcaccgacacaacaatggcacccaaaccaaccatctcaatattcacactcttagaaccacccggcgggataggcgcaaactcccactccttcaaacgatccatcacatcctcaaacccgttcaacaatgcagactgctggcgaggatccgtatcaatagtgatccaatcatactcctcgacaggatagtccgaagacacacgcaaaccatcaatctgcacagaccacgactccaaaggcccctcaacacgaatcacaggccacgcagcaacatcacccttattagacagatgatcccaacccgaaccaacaccaggcatcaacacaaccggaaaagccgtacccttcccaccgacagggccgccacccaaccaatcctgtaacttagcattactaaaacgaaacttttgctcatccccataccaaaacgggtcataagctgtcaaatgaatcacatagcgcgcatagccacgattcaccggatccaccgtaaacgtgtcatccaccgaatcaaaccgacacttcaacacacgctcaacaccggcaggcgtcttcacagacaactccccctcctccccgggaggaaacgcagaccacaactgatcgtatgcttgcaggaaaccgtcacgaaacccgccatccggatccgggccgacacccgacaccaacaccggcagcgtcacctcgcgaggcttcacattaaacccgcgccactccgagccgtgcaccccaacatgtgtttgagaaaaatgctccacctcaggcacacccaaaccacgcaacgaatcattcaacaacatgacaggagacgaccccgtataatccgtcaaatgaagcacacgctccccaccaaacagcggatccataaaccacgtcacagtcaaaccagaacgatcagacgggttaggaataaacatgcacaacacccccaatcacacgtaagccaacgcattcaacgcgtcacgctgctgccgctcaatccgcttcgcaaactcgttaggatcaccataagtaggcccattcacattcaccacaacactcttatcattcatacgctgatacctgccatacggggtaaacgagcccaccgacgatcgcacaccaaaccgggcatcaaccgcatcaggcagccgaccagccacacccgacatcgcatccaacgccaaaccagcattcccagtaataccctcagccaaaccagcaacaacctgccggccaacctcgtcacgaaacaccctcgacggggaatgaatacccaacaccgacttcgccgcattcgcaacctgagaacccatattacgcacagtatccaacaagccactcatagcattccggataccattacccaaaccagacaccacatcacggcccgcagacaccaacaaggaccccatattaccgagagcatgccgaatattaccaggcaaattccggaaaaaacccagcacaccatgcaccccgctagacacagcggaccccatagcatgcatagcagaagaagccgcactccgggcaccattaaacccgcgcacagcaccactacgaaccctagacgccatcgacccgaaaaacccgccaacagcagacgccaccgaagacacaacactccgaatagcattcatcgcagaagaaacagcaccacgggccgcgttaaaaccagacctcacatgggaggcaaccgaagaacccagccgggcaaaaaaccccacaacagcgttcacgccgccagaaatcaccgacttgaaaccgttaataaacgcagacgtaaacgctctaatatgattccagccattcaagacggccgtgcccatagatctcacgccagacactaaatgattcacaacccatgaaatgacacgggtgacagtcccaataatgcgggctgcagcagacacaatagcgccaagaatacgtgcaacaaacccgatcacagctgtcacaatcggcatcacaaccggaataatgcgggccaccacctgtagcacgacaccaacaacctgcatcaccacacgcataatcgacatgatgactggtatcagcgaccggatcaggccgatgatcggtggcagaacagacatgacagcacccaaaatctgttgaatcaccggcatcaaaacaggcaccaactgcatgattacaccaacaacctgccgtatcacggccacaacagcctgaataaccggcaacaacgccggcaacaacattgcagcaacctgtgtcaccgcaccaataatctgcgtgataacaggaaccagccgggcaaccagcataccaatcaccggcataagctgcgccgctagcccggcaaccataccaataatctggccaaaaacgggcgccaaccgtgccaccagcccagcaaccaaaccaaacagtggctgaatagcggccattatctgccccaaagcctggccaaccacagccacaagctgcataacagcggcacggaactgggcgttagtggcaaacattgccgcaaacaggccgatcacaataccgacaggaccacccagggcgcgaaacacgccgccaagcccaccagcggcacccctcaaagcaccaaacgatggcaacaaattcttcaacgcaaccgccaacggggcaaaccctgcaacaagcttccccacacccgcagcaacaataccaaacactgcggtgccgccagcaaacatggcacccaaattcaccttcgggacaggcaaatgcaacctcgcaaaaatgcccttcaactgctcaaccttggcgcgcatctgtgcattcattctcgtaatcatgccaggcatacgattaatccacgccaaaatagacggcatcacccgctgaataccctgatccaccgacgcaaacaggggcttcacagaatcagtgaccgacttgataaccggattcaacgcaacaaaaatctgcctcaacccgttaagaaacggcgccatagccgtagcaccaagataacccagggcacccttaacattcttcatagcgccctcaaacgtcttaccagacgcctgagcagcaccacccataccaagcttcatcgcagccgcaaacgtggcaaaatcaatctgccccttcgacaccatctgcgacacctcagcagacgttttacccgtctgcctagccaacagggacaacacaggaacaccagccatagtaagctgcaacatgtcatcgccctgcaacttaccgcgagccataaccgacgtaaaaatagcgcccgtatcctgaaacgacttcccagaaatatacgacacatccgcgacagtcttcaacacgtcagtcatctgaccgccagacttgacaccagaagcagacaacgccgccgcggtagaagccgcatcacccaacgcatacgacgtgccagtcacagcctcaatagccgaattcataatcgaagacgtgtcagaagacgtgtgacccaaaccagtcaacttagcctgggcctcatcgatagccatcgccctagcaataccgccaccaatagtcacatcataaatcgacttgagaccctttttagcaacattgatagcacccatcatcgcggcgccacccaaagccaacttcatcccgctagcaaacaagctacccgaacgctgaccctccgcaggcatcaccccagaaagctgtttaccaacatccgccttcaaaccaggcatcttcgtatacaacgacacatatgcggaagcaatctcaccagacatacactattcaccccataatattaatctcgcgagacaccccgccaccggcacgaacacgcgccaaaatatcgtccacctgcccagacgtaaaccgggccctacgctcatccgtaggcctcgccacaggctccggctgcccctcactattagcagacctgtaatgatccagcatgtccaacaccgcccactcgcaccactcaaacgggcgctgccaaccattcaggtgggccgccagctggctagacgtatcggtacacaacacgccagccagccggacagcctcaccccaacacatctgcgggccaccaacatcataaaccgagcaaccgaaccgggtcctccaatcatattcgatggccccacgataatcatcaatcaggccgtggagccaaactattcccccaaggaggccgctttctggtcaggcttgtattccatccactgacggaaaatctcggcaacacgaaccataggaagcccctccagggcctccacagcgtcagccggggcggcagcctccaacatagaaaacatcacctcaacctgggcgaaatccgccgactcccccgactgggcaatcttagctgcacggcgaaacacgagggcaggcacagcttgagccgtctcctccgcatccgccaacacccagctacggtcaccaatcttcaacgtgtaacctgtgtcactcatctatcaacaatccctaaaatcgtgtatcagttctcggacggcggattcggatccggctgaggcttcggaggaaccggaggagtatcagcttttaaagccgtcatccacccccgaccagacaccgcatcacccttatggttaatctgggcaggatacgccttcaacgtcacaccatacccgtacacctcgccattcttacccttaatctcgtcacgatcgacaagctcaacctcagggaaatagtagcgaataacctgatcgccatccacaatatccatcaacagggcgtgaacacccgtcgtggcacccggagaaatatcgaacgaacccgaatcggatccggcagtaaccttcgactgccaaaacagctcaataacctccttcttagactcgatcagctggaaagaaatctcgatagacgactcggtagcaaccgtgcgaacaacatccgcattctgccaagccttcaaatcatccgttttacgctcaggcttaatcttaaacccgtcatcagacaggtaccctaaagcggtaagaccggaaggaaccggctccacacccttaatagtatcacccgcgtgcgcgtcaccaatataaacatcgccagtaaccgctgaacgaacattagacgctttacgtgttgcagccatcacaacccccattaaatatcaaacaattacattaaaacaaaaacaataagcttattcagactccgcaggcctacatatcagctcgaacagcgaatacacatcaaaacgtgcaccatcaaccagcaaatcaggaccagtagaccgtttacagtacaccaccggatcaccatcaaccccgtcagccagaacagcctcaacacgacgcgccaaagacatagcccgatcaggcgtatcagaaaacacattcacgcgcaaaaaaacacgctcacgcacatgcaactgcgggccaccatccaacgccaaccaaatcaggtcacccgtaaaatcatcgggcaccgtccccacacagggtatatccgacagccagccatcatccttgagcacgcgtttagcccacttcctggggtcatcgtagacgatcacgacgcagccccaatcgaacgagccaacgtgccatgcttcgcctcaatacgcttcccacccttatatgtggtgcctatacgagcgacagcctcaacacggtgaacctgcacctccgacgacaaaccattacggtattgggccttatcgaaagcgttaccgcccacattcgccgaggccgcacgcttgacacgctcgccacgctcagccaacatagcctgcaccccagaagacttcaacacctcacgaatacccggcaagttcagcttcacattcacatcctgagccactacccatcagcccttcttgcgcttcacattgatctgcgtgcccgcatcccagccagacatcggatgatgccacaccataggagacccgtcagcctcccacacaacaccccggatacgccacctacaacgataatcagcgcccacaacagactgcttgaaaagcatcgaccaatgctcatagtcagagtcacgccccgcggcctcatcctcctgcgaaacggaagcatagatggccacgttatgtaacacagtctcgacaggcttagaccagtcttccaccttgtcaccaagatcatcgacacgaacagtcggttgaagcatcacaaccgtttcaccataaggaaaactggtcatatcatatctcccacaaagggccagcgtagccgttaatattcgacccgcacgagcaaccctcaccccacaccgtggaacacgcctcagaatgattcacactactcctcatggtcggtgtgatagtgaacgctttaccagccccactattcccctcacacagcttcttcaacgcagcaatctcagaaggccacaacaagttcgtaggcgtattagaccgtgtagtctgagcgaaaggacccgcagactcatactgcacctgacccgacacgccagtatcattccagcgcaacaaagccctgcgcagaatagccttagcggcatccttgtatttgaaatccggtttagcgatacagggggcgacactgacagccacagcctccacatcggcaatcatcgcctcaagcttctctctaggaatatcggcgaaaggctcaatatcctcaggcttcaaaatgatacccatcaacaccaccccctgcacattgacacatcaccgcaacaataaatcagttctcagccggcggattaggcttcggggcagccttctccttcacaacagcaaacgaataaagcgactcgatagccacatacaggacagcctcggcacgaaccataacctcgttatgtcccttaaggtcacggccagtctgatccgggtcgccatactcgatcagttcgatcgggaagttacgctggaaaccccaatgaacacgcgagaaatcaccaacaatagccttaacacccgaggcaggcgacatctccggggcgccagaaacagtcgaagaagcaccaacattcaagccacgccaattatccaaaccagcgaaaccggcggcaggatacatcggctggccggcaagcggcgaacccttcggatacacctcagtagacagagcaaacgaaaacgccggatccaaagcaacaccgttaggaacctgcaaaccagcaccagcaataagaccgacagccttaaccagatcggccgtagcagaatccgtggcatcaacaacattcttcgtcttatccagcgaagacttgacagtagtagcaggattacccgtagcaggatcaataccgtggaaggcaatcagatcaacagcgcgaccaatcgaggcacccagggcaggcgaaatcagatcctgaagcacacccagacggtaatcggcgtcagcccacataaactcgtccgagacacgctgctgagtcaccaccttgataggctgcgcagtaaacgaggaaacatcaaccgaagcagacggcttaacctcgccctcaccaacaatcttcgcgcgaggaacacccgaaaacacggcacccttcacaggaccaaaaatagtcggctgctccggcgacagcttcgccaaaacaccagaatcgatagcacggtcacgaaccgcaccaatcatagaaccaggaagctcaagcttccctacagaaagaaaatcgtcagccatcagaaatcatctcctagaattattgacaagagcatccacaaacgcgacaccctcacgtcgtttaacatcatcaacgggggcactccccgcaagacggcgcacacccgcgccaccactactatggtcgatcaaacccttcaaagctttcgcagactcggcaagcgactccttatcgccacccgacaagaaaacgatcgcatcactggacaaaccatactcggaagccacctcgcgcttcacaccatcaagaacaaacccgttgatcctagcctcgagttcctcattcttgcggcgaagctcatcaatagtagatccagaatcaccatccgaggcgcgaagcttctccaattcggcgaaattacttttagcacgagactcccacttacgagcctcagccttccaatccgtaccagacggcccagaaacctcacccttcacagaaacatcaccggcatgatcatcgccggcagcccgctcatccttcataacatcaacaatgtctccaccctttccgggctcaacagcatcattgttgacattctgttcttcaacttcttgatcggccatagcctaaccctatactccttgcggaaaacaacacaatattgttgacccccgtgcgggagacaaccctgtgcaccgataaccggcgacgcacaaccggaaaccatcatctcatgtcgccaacagtacgcatagccttcaaaatattgccaggcgactgctgcaacccgtgatcatcaacccactcacgggccttctcatacgtcctctgatactcggcatcagccctattcggttcccaagggccaacaacctcaaccaccgtacaaccacaatgatcatgatacttcgaaccaagcggacgcttaccaccacgcttatgacgccgagtatgacccacagtcaacgcccgctccctcgtcgtataatccgatcgcgtagccaacatggcacaaaaagcacacggatcaccatccgtcacccgacgccacgacctaccctgcgcacccgccgaccactcaaccgtgtcacgaccagcattcataacagcccgatcaaaacccgcagccatcgcatcaatcgtgtcattcgccctatccgggtcactattcatcatcttcatagtcgaaaacgacctagccaacgctgcggcagcatcaaactcgtcatacacgatcaaaccaggatcgacaccgttcaaccggcgaaaatcttgcacgaatttagctgccatagctgctgaaccgtcatggccggcacgctccaactccacgcacaaacgcacatactgtgtgtcactcatcttcccggaatgccacaaacgacccaactcggcataatagcccgcatacttcccggcaaacctgaccgcctcacgctgatacccggtagcagccaacctcgacgcaacacccgaagccatcgcctatcatacctcgttagtttgacgcgatatagccccagcaagcgcagccaacggatccgaagattcggcacgatgccgcatcacagcctcaacctgcacatcatcaagccctaacatctccaacaccgtccgagaatccgcgggcaaaataccggcaccaacaagcttcgtcacagcatccgccgtagcagcccgagtcggggttgaagcatcacgccaacgcaaaccaacatcaccaaaaaaatcggcctcatcaacacgagaatccaacgccttagcagccaggaaaccaaccgacagccagccctgaccaaacgacgtttgacgccgctcagcacgcttcacaagcctcgactcctcggcagccaacgcctcacccgacggcggattagacgtgataaacccgaaatagcgctccggcactgcagcctccccggccgtcaactgcgccaacaatctcatctgatccgaatacggtgtaggactattgacaggaaacgaccccacattcggggtatcaccgtcatcatccttatcaacagcccacacagaagccatcgacaggacccagccaggctgcgaaaactcgtcagccgacacacccgtaacccacctttgcgggtaggcgtagaagtcacgattcacagactgccccaacagtgtgcgaacagcctcatcagtgtaagccctaatagacctcgtaatctccgaacggccatcaatacgcgacgtcctacgccgattcacaatcggcaccaacggaaccgccccaagcacattcggtatacggcccacctcgacccactcacgagacccacgccgctccacctgaacaatcacatcaggcagcaacaactccgcctcaacaacctcaggatcacacgtctgctgcaccacaaggccagcatccaaacgagacccatcggcagaaaacttgcctgtgcaattcttcggtgactgcggacgaaccaacaccgacccatcatcctgggggataacagccacaaacgacaacccaaaaatcagcgcatccaaatgcacatcacacgacgccgtagcaagccgattcgccgcatacacaccatccagaccgtagccgtcaccattagtccagccaagccaatccagacgctcctccaaagcatccaccgcaataccaggccacgacaccaccgtctgcacacgctgcaactccggaggaatagccacaccaaggtcacgcacccgggcagaaccctcatagtagccctcaatacggcaatgccacgaagacaacctttggatacgatcaaacatgccctcaatcagggccaactcatccgagttcataccacagacacccgcttcctaccactacgctcccgacggccacgacgaacacgcttagcccccaaaaacgccaacgacacagcctccaaaggaacctcagaaccatccttaaacgaggaaccccaaccccacgcagaacccttcttcttctgcacagccgacctcacagcaatatccaacatgtcacgcctcgaatcagccctagggtgagaaacactcccagacctgacaccctccagaaacgcttgacacgcctccacatacaccccagtatcagccacaatcacgccacggcccggaacaccacgatccgtcagcgctttttgcaacaacaccgcaccagacccggcaaccatgatccggtcagtatcaccccaacgaaccgccaaccagtcagccaaccggcccacaccatcaacaatcgttcccgacagcccatcaataacctcaacatgaaccccagcatcagtcttgccggcaccagccaaagcaacccgatccccagaacgagaaaacgagacaccaaacactttcccgccaaccagactcgcctcacccacagcagactgagcccacttatcagcaggaaccacagacgcagcagactggccacgatcccaccagccaagccgctcccgagcaaaaccggcagcagacatcgactcatgctcatccgacacagtaccaaaattcagacgacgccccaacgccggattagtgtcaccagccaacttccgccactgccgcgacacatcatccggatcagactcgtcaggaatcgaaaactccgtccacgcaaaccttttaccacccgacaaagcctgcccacgcaaacgcaacacaaccgaaccatccgccaacggcccaggcggcgtgcccaggaaaatctgctgaggatcacccgaaggagccgcagacaccgtaggaagcaaagcctccaactgctcatccgacaactcctgagcctcatcacacaccaaatcatcaaccgtaaaaccgcgagcagaaccccgagaacgagccacaaactcaaccgaaccccaacccggacaaccacacttacgctcaaacgtggcacaatccggatgatgcaacacaatagcctcctgaccattcgtcgcccgaatcgacttcaccatacgatacaagtcaggaaactgccgctcattctcaaaaaacgaacgcaaccgcataaacgccttacgagccgacttcaactcgtgagccgtatgcaaaatacggcgaccctgaatagtcgccttaaacaactccacaacctccaaaatagcattcttgccattctgacgaggcacaaacaccccacacacacccgaagcaagcctgccattgctaccgacagccagccaatcatccaacacctgctgctgccaaggatcaggcgtcaacccgtaagccctaccaagctccccagcatcacccccagcagtcaccgaatacgccgcagccacacgatgacgaggaatctgagacccaacaacaccagacacctaatcaggcccccttgcgcttcctataccggtcaatcatcgccaccgcagaacccccaccacggccaccagacgccacatcaaccgaataacgatccaacatgcccataaaagccttcacatgagcacgaagcgaagccaccaaatccgcgcgaccctcacgccacacacaatcatgaatcaccgcagcatccatgagaaacagccactcctcatcagacacgtacgatgcgcggctatcctcaccccacacacgccaccaacgacgcgtctccccacaccaatcacgactatcaggaagctcaggctgcacaacactcaccaccaacacaaaaagtcgacaaacagacaaatccacaaaagggaggtatttcactaagccgtacgaggtcttgcacgggtgtgcagggggtgtccccggtgggggttggcgggtttttcaccatgaaacaaggttttttgtggtttgttgttggaacttgatgtttggttcgctgcgattgcctttgcttctgttgcatgttctgcagatgatttgcccgttgtcgagggtgttgagtcctcccctgctgacgggtgtgatgtggtcggcttcggggctggttggcaggtcgtgtgtgtcccaggtgatggtgactccgcagagtgggcattcggtttggccttgctgtcgggcttgagtgatgagtcgttgccgccagcggcggtgggcttggctggctgtgcgattggtgcgtgccatgatgtgtctgttcctcacctagccctgtatgggtcttatttgcccctgtaacggcctggaatcgtctgggggtatgaataccttgcccttgccctgctgatcgatcctaggccctgttttgtgtgtttgagggggcgttctgtttgtggtggggtgtttgttttctccactacccccctggcatgtgagaaagatcacatcgccccccagctgtgtcaaaagagaaggacacgaaagaaaaagggggtgggtgggtgttcgcatttcaaggcttagcgcttggcgcctagcgtgaaggaacacggctcaacagaaacaccctataggttttaaagtcttctacatataatgtacactttaagtcttacctagtgttaagggtgtgagcatgacacgccgtacgccttcagccgaacacgccaagcctgaaaggggcacggggtgtgagagtgtggggagtgtgcaaccgggagcgtgcgaccggtggtacacgagtcacacggtgaaagcccatcggcgctgacagcaaaaggttcctcttctcccctgatgaagaaaagaagagaagagagaaagaaccaaagagagtagagaagtaaagaagttaaccccttagctcttctaaaacttttataacttataagctttaataacttatattataatacctataagctttaagacttataggttataatattaaagtttaagactgatggttaactttaagtacttaaggtctttaatgttttatagttacttaaagtattaaagcttataagcctttaagtcttaaatactgatgtgaagtttatatccttaagtgcttagcctttaaggtttaaatattaacttaagtgttaaggtctttatactgatgctgagccttaaagggctcagtgttaagtgtgtaagcctttaaggtttatatgttatcttaggtgcttagctgttaaggttattaattaactttaagtgttaggctcttaagtttacttaaagtgtttaaagcttttatagtaacttagatccttaagggctaagctcttagggctgatgccgagcccttgaggggctcggtgctaagtgttaaggtcttaaaggcttagcgcttagccttgaagctttaaagtgtttggtagactgatggatgtaagggtgaaagccgcgtcagcggatttcggccttgcgtccagctggctacctgtccagcctatcataccccacctgggatgagtcaaactggtggatttggctctataggcgggtttgaggggtgtaaacgggtgtttttggtagtaaaggtccaaaaattaaacctaaacttttccttaaattttcttagagtcttgtaacctttgagggtggttaaggctgaaacccctagtcagaacgggtttcactcccgaacaactctcacactgtactcttgtgtcctttccgaacacgctaggcgctgatgtgctgagggtgttccctcaggctttcgagtactcgtcgctagggctcctcgtactctcaagccttccctggatggtgtgtacttgctaaggctgtgccggatcggctgagcccgatgaggctgatgccgagcccttgaggggctcggtgctcagcgctaagaccttaaggcgtgaaggctgatgctcccccttctttcttttaccgtgtccttcttcccccacagtatccaacactgtccacatagttgaggcttagctaaccatgataggggctggtgatctgtgtctagatggttgatggcatatcaggctcctagaggcgtctagaatcgatcagaatgtgctgggggtataaacacctagcccccaccctgtaaggcgctcctaggcgccatgtgaaggctttaaacggcatttctggtctacaccctccacgccagataggcagagtagccgtgagggtgcacgctaagccaggaggatgtgatacatctcacacagcatagggtgcagatcctatgcccagatctgacacctcgacctttgcgatgtgggcctatctcgactcgctagatcatctgtcacacctgctatcacccagacatacccctgagacaccttagaaggcccctagaatcgatcggcaggcccaaccctatataatcctaccccggacatatttcaggcgcctagagaggctataagggcttaagtgacatctgtcacacccgacactccagcatgaaacgctcaatccgattgagcgtttcatgctggagtgtcgggtgtg

SEQ ID NO: 16 - DNA, 29960 bp, Propionibacterium acnes bacteriophage
cagccttaaccaccctcaaaggttacaagactctaagaaaatttaaggaaaagtttaggtttaatttttggacctttactaccaaaaacacccgtttacacccctcaaacccgcctatagagccaaaaccaccagtttgactcatcccaggtggggtatgataggctggacaggtagccagctggacgcaaggccgaaatccgctgacgcggctttcaccctcacatccatcagtctaccaaacactttaaagcttcaaggcttagcgctaaggtgctgatagcttagcaccgagcccctcaagggctcggcatcagtcttcaagccttaaacacttaaagtacatataaaactttaaaagcttaagtacttaaagatataagtaaacattaaagctttaaagtcttaaagtatatatataaccttaacagttaaacgttaaaagctttaaaccttaacacctaagttaagtataaaaccttaaaagcttagcacttaaggatataaacttcacatcagtgtttaagactttaaaacttaaaataactattaatacttaaaaccttaaagctttaaacacttaaagtaactataaaacattaaaaaccttaagtacttaaagttaaccatcagtcttaaactttaatattataacctataagtcttaaagcttataggtataataatataatataagtattaaagcttataagttataaaagttttagaagagctaaagggttaacttctttacttctcttctctctttggttctttctctcttctcttcttttcttcatcaggggagaagaggaacctttaaccgtcaacgctgatggactttcaaccgtgtgtctcgtgtaccaccggtcgcacgctcccgatggcacactccccacactctgacacccgtgcccctttacggcttagcgtgttcggctgaaggcgtacggcgtgtcacgctaacacccttaacaccgggtaagacttaaagtgcatattatatgtagaagactttaaaaacctgtcagggtgttcccgctgagcctgtgtcctacacggctaggcgccaagcgctaagcctgaaacgcgaacacccaccccccttttttcttccgtgtccttctctttttgacacagctggggggcgatgtgatatttctcacatgccagggggtagtggagaaaagcaaacaccccagcaagttcaagacaccccctcaaacgcacaaaacagggcctaggatcgaatagaagggcaccggtagagtattcctacccccaacacgttccaggctgttacaggagcaatgagaggctcacaggggccataggagatcagggggcgtgatggcacacaccaaccgcacagccagccaagcccaccggcgctggcgggcgcgactcatcacccaagcacgcaagcaaggccaaaccgaatgcccactctgcggagcccagatagcctgggacacacacgacctgccaaccagccccgaagccgaccacatcacacccgtcagccggggaggactcaacaccctcgacaacgggcaaatcatctgcagaacatgcaacagaagcaaaggcaatcgcagccaaccaaacattagtttccaacaacaaaccacaaaaaccctgatcccatggtgaaaaaacccacaaaccccacgggaaccaccccctgcacacccgtgcaagaccacgtacggcttagtgaaatacctcccttttgtggttttgtctgtttgtcgactttttgtgttggtggtgagtgttgtgcagcctgagcttcctgagtctcgtgagtggtgtggggagacgcgtcgttggtggcgtgtgtggggtgaggatagtcgcgcgcagtacgtgtctgatgaggagtggctgtttctcatggatgctgcggtgattcatgattgtgtgtggcgtgagggtcgcgcggatttggtggcttcgttgcgtgctcatgtgaaggcttttatgggcatgttggataggtattcggttgatgtggcgtctggtggccgtggtgggggttctgcggtggcgatgattgaccggtataggaagcgtaggggggcctgattaggtgtctggtgttgttgggtctcaggttcctcgtcaccgtgtggctgcggcgtattcggtgactgctggcggtgatgctggggagttgggtcgtgcgtatgggttgacgcctgatccgtggcagcagcaggtgttggatgattggctggctgtcggtggtaatggcaggcttgcttctggtgtgtgtggggtgtttgtgcctcgccagaatggcaagaacgcgatccttgaggttgtggagttgtttaaggcgactattcagggtcgccgtattttgcatacggctcacgagttgaagtcggctcgtaaggcgtttatgcggttgcgttcgttttttgagaatgagcgccgctatccggatttggctcgtatggtgaaggctgttcgtgctacgaatggccaggaggctattgtgttgcatcatccggattgtgtcacgtttgagaagaagtgtggttgtccgggttggggttcggttgagtttgtggcccgttctcggggttctgctcgcggttttacggttgatgatttggtgtgtgatgaggctcaggagttgtcggatgagcagttggaggctttgcttcctacagtaagcgctgccccgtctggtgatcctcagcagatttttttgggtacgccgcctgggccgttggctgacgggtctgtggtgttgcgtcttcgcgggcaggctttgtcgggtggtaaacggtttgcgtggacggagttttcgattcctgacgagtctgatccggatgatgtgtcgcggcagtggcggaagcttgctggtgacactaatccggcgttggggcgtcgcctgaattttgggaccgtgagcgatgagcatgagtcgatgtctgcggccgggtttgctcgggagcggcttggctggtgggatcgtggccagtctgcttcgtcggtgattccggctgataagtgggtccagtcagctgtggatgaggcgagtttgtctggcgggaaggtttttggtgtctcgttttctcgctcgggggatcgtgtcgcgctagctggtgccggcaagactgatgctggtgttcatgttgaggttattgatggcctgtctggcacgattgttgatggtgtgggccagctggctgactggttggcgttgcgttggggtgacactgaaaagatcatggttgccgggtctggtgctgtgcttttgcagaaggctttgacggatcgtggtgttccgggccgtggcgtgattgtggctgatactggggtgtatgtggaggcgtgtcaggcgtttttggagggtgtaaggtctgggaatgtttctcatcctcgtgccgattcgaggcgtgacatgttggatattgctgtgaggtcggctgtgcagaagaagaagggttctgcgtggggttggggttcctcgtttaaggatggttctgaggttcctttggaggctgtgtctttggcgtatcttggtgcgaagatggcgaaagcgaagcggcgtgaacggtctggtaggaagcgggtgtctgtggtatgaactcggatgagttggctctgattgagggcatgtttgatcgtattcaaaggttgtcttcgtggcattgccgtattgagggctactatgagggctctgcccgggtgcgtgaccttggtgtggctattccgccggagttgcagcgtgtgcagactgtggtgtcgtggcctggtatagctgtggatgctttggaggagcgtctggattggcttggctggacgaatggtgacggctacggtttggatggtgtgtatgctgcgaatcggcttgctacggcgtcgtgtgacgtccaccttgatgcgctgattttcgggttgtcgtttgtggcgatcattcctcatggtgatggtacggtgttggttcgtccgcagtcaccgaagaattgtacgggccggttttcggctgacgggtctcgtttggatgctggccttgtggtgcagcagacgtgtgatcctgaggttgttgaggcggagttgttgcttcctgatgtgattgttcaggtggagcggcggggttcgcgtgagtgggttgagacgggccgtatcgtgaatagtcttggtgcggttccgttggtgcctattgtgaatcgtcgccgtacttctaggattgatggccgttcggagatcactcggtcgattagggcttacacggatgaggctgtgcgcacactgttggggcagtctgtgaatcgtgacttctacgcctatccgcaaaggtgggttacgggtgtgtcggctgacgagttttcgcagcctggctgggtcctgtcgatggcttctgtgtgggctgtggataaggatgatgatggtgacactccgaatgtggggtcgtttcctgtgaattctcctacaccgtattcggatcagatgcggctgttggcgcagttgactgcgggtgaggcggctgttccggaacgctatttcgggtttatcacatcgaatccgccttcgggtgaggctttggcggcggaggagtctcggcttgtgaagcgtgccgagcggaggcagacgtcgtttggtcagggctggctgtcggttggttttctggctgccagggcgcttgattcgagtgttgatgaggccgcgttttttggtgatgtgggtttgcgttggcgtgatgcttcaaccccgactcgggcggctacggctgatgctgtgacgaagcttgtgggtgccggtattttgcctgctgattctcgtacggtgttggagatgttgggtttggatgatgtgcaggttgaggctgtgatgcggcatcgtgccgagtcttcggatccgttggcggcgctggctggggctatatcgcgtcagacgaacgaggtttgataggcgatggcttcgggtgctatgtcgaggcttgcggcgactgagtatcagcgtgaggcggtcaggtttgctgggaagtatgcgggctattatgccgagttgggtcgtttgtggcgtgccgggaagatgacagatgcgcagtatgtgcgtttgtgtgtggagttggagcgtgccggccatgatggttccgcggcgctggcgggcaaattcgtttcagattttcggaagcttaacggtgtcgatcctggtttgattgtgtatgacgagtttgatgctgcggcggcgttggctaggtcgttttcgactatgaagatgatgaatagtgacccggatagggcgaatgacacgattggtgcgatggcggcgggtgttaatcgggctgtgatgaatgctggccgtgacacggttgagtggtctgcgggtgcgcagggtaggtcgtggcgcagggtgactgatggtgatccgtgcgcgttttgtgccatgttggctacgaggtcggattatacgaccaaggagagggcgcttactactggtcatacgcggcgtcataagcgtggtggtaagcgtccgtttggttcgaagtatcatgatcattgtggttgtacggtggttgaggttgttggcccttgggaaccgaatagggcggatgccgcatatcagaggacgtatgagaaggctcgtgagtgggttgatgatcatgggttgcagcagtcgcctggcaatattttgaaggctatgcgtactgttggcgacatgagatgatggtttccggttgtgtgccgccggttatcggtgcacagggttgtctcccgcacgggggtcaacaatgttgtgttgttttccgcaaggagtgtaggttaggctatggccgatcagagtgttgaagaacagaatgttgacaatgatgctgttgagcccggaaagggtggagacgttgttgatgttgtgaaggatgggcaggctgccggcgatgatcatgccggtgatgtttccgtgaaggaggagtcttcttctggcacggattggaaggctgaggctcgtaagtgggagtctcgtgctaaaagtaatttcgccgagttggagaagcttcgcgcctcggatggtgatgcggggtctgtgattgatgatcttcgccgcaagaatgaggaactcgaagaccggattaatgggtttgttcttgagggtgtgaagcgcgaggtggcttcagagtatggtttgtccagtgatgcgatcgctttcttgtcgggtggcgataaggagtcgcttgccgagtctgcgaaagctttgaagggtttgatcgaccatagtagtggtggcgcgggtgtgcgccgtcttgcggggagtgcccccgttgatgatgttaaacgacgtgagggtgtcgcgtttgtggatgctcttgtcaataattctaggagatgatttataatggctgacgattttctttctgcagggaagcttgagcttcctggttctatgattggtgcggttcgtgaccgtgctatcgattctggtgttttggcgaagctgtcgccggagcagccgactattttcggccctgtcaagggtgccgtgtttagtggtgttcctcgcgccaagattgttggtgagggcgaggttaagccttccgcgtctgttgatgtttcggcgtttactgcgcagcctatcaaggttgtgactcagcagcgcgtaagcgacgagtttatgtgggctgacgctgattaccgtttgggtgtactgcaggatctgatttcgcctgccctgggtgcttctattggtcgcgccgtggatctgattgctttccatggtattgatcctgccactggtaagcctgccgcggctgtcaagacttcgctggataagacgaagcatattgttgatgctacggattccgctacgactgatctggttaaggctgtcggcctgatcgctggtgctggtttgcaggttcctaacggtgttgctttggatccggcgttctcgttttctctgtctactgaggtgtatccgaaggggtctccgcttgccggtcagcctatgtatcctgccgccgggtttgctggtttggataattggcgtgggctgaatgttggtgcttcttcgactgtttctggtgccccggagatgtcgcctgcttctggtgttaaggctattgtgggtgatttttcgcgtgttcattggggtttccagcgtaacttcccgatcgagctgatcgagtatggtgacccggatcagactgggcgtgacctgaagggccataatgaggttatggttcgtgccgaggctgtgctgtatgtggctatcgagtcgcttgattcgtttgctgttgtggaggagaaggctgccccaaagcctaatccgccggccggtaactgattcatttgttgcgataatgtttatgctgtgtgcagggggtggtgttgatgggtatcattttgaagcctgaggatattgagcctttcgccgatattcctagagagaagcttgaggcgatgattgctgatgtggaggctgtggctgtcagtgtcgccccctgtatcgctaaaccggatttcaaatacaaggatgccgctaaggcgatccttcgtagggctttgttgcgctggaatgatactggcgtgtcgggtcaggtgcagtatgagtctgcgggtccgttcgctcagactacacggtctaatactcccacgaatttgttgtggccttctgagattgccgcgttgaagaagctgtgtgagggtgatggtggggctggtaaagcgttcactatcacaccgaccatgaggagtagcgtgaatcattctgaggtgtgttccacggtgtggggtgagggttgctcgtgtgggtcgaatattaacggctatgctggccctttgtgggagatatgatatgaccagttttccttatggtgaaacggttgtgatgcttcaaccgactgttcgtgtcgatgatcttggcgacaaggtggaggattggtctaagcctgtcgagactgtgtatcataacgtggccatttatgcttccgtttcgcaggaggatgaggctgccggccgtgactcggattatgagcattggtcgatgctgttcaagcagcctgttgtgggtgctggttatcgttgcaggtggcgtattcggggtgttgtgtgggaggctgacgggtctcctgtggtgtggcatcatccgatgtctggctgggatgctggtacgcagatcaatgtgaagcgtaagaagggctgatagattgtggctcaggatgtgaatgtgaagctgaacttgccgggtattcgtgaggtgttgaagtcttctggggtgcagtcgatgttggctgagcgtggcgagcgtgtcaagcgtgcggcctcggcgaatgtgggcgggaacgctttcgataaggcccaataccgtaatggtttgtcgtcggaggtgcaggttcaccgtgttgaggctgtggcgaggattggcaccacttataagggtggtaaaaggattgaggcgaagcatggcacgctggcccggtcgattggggctgcgtcgtgatcgtttacggtgatccgcgtgtgtgggctaaacgtgtgctcaaggatgatggctggctgtccgatataccgtgtgtggggacggtgcctgacgattttactggtgatctgatttggttggctcttgatggtggcccgcagttgcatgttcgtgagcgtgtttttttgcgggtgaatgtgttttcggatacgcctgatcgtgctatgtcgttggcgcgtcgtgttgaggctgtgctggctgacggtgttgatggtgatccggtggtgtactgtaaacggtctactggccctgatttgctggttgatggtgcacgttttgatgtgtattcgctttttgagctgatatgtaggcctgcggagtctgaataagcttattgtttttgttttaatgtaattgtttgatatttaatgggggttgtgatggttgcaacacgtaaagcgtctaatgttcgctctgctgttactggcgacgtttatattggtgacgcgcacgcgggtgatactattaagggtgtggaggcggttccttccgggcttacagctttagggtatctgtctgatgacgggtttaagattaagcctgagcgtaaaacggatgatttgaaggcttggcagaatgcggatgttgttcgcacggttgctaccgagtcttctatcgagatttctttccagctgatcgaatcaaagaaagaggtcatcgaactgttttggcagtcgaaggttactgccggatccgattcgggttcgttcgatatttcaccaggcgccaccactggcgtgcacgctttactgatggatattgttgatggggatcaggttattcgctactatttccccgaggttgagcttatcgatcgtgatgagatcaagggtaagaatggcgaagtgtacgggtatggtgtgacgttgaaggcgtatcctgcccagattaataagactggtaatgcagtgtcgggtcgggggtggatgacggctttaaaagctgatactcctccttctccgaagcctcagccggatccgaatccgccgtctgagaactgatacacgattttagggattgttgatagatgagtgatacaggttacacgttgaagattggtgaccgtagttgggtgttggctgatgcggaggagacggctcaggctgttcctgcccgcgtttttcgccgtgcagccaggattgcccagtcgggggagtctgcggatttcgcccaggttgaggtgatgttttctatgttggaggctgccgccccggctgacgcggtggaggccctggaggggcttcctatggttcgtgtggcagaggttttccgtgagtggatggaatacaagcctgacggtaagggtgcctccctgggggaatagtttggctccacggcctgattgatgattatcgtggggccatcgaatacgatttccgcaccaagtttggtgtttctgtttatagtgttggtggcccgcagatgtgttggggtgaggctgtccggctggctggcgtgttgtgtactgacacgtctagccagttggcggcccaccttaatggttggcagcgcccgtttgagtggtgcgagtgggctatgttggacttgttggatcattacaggtctgctaatagtgaggggcagccggagcctgtggcgaggcctacggatgagcgtagggcccggtttacgtctgggcaggtggacgatattttggcgcgtgttcgtgccggtggcggggtgtctcgcgagattaatattatggggtgaatagtgtatgtctggtgagattgcttccgcatatgtgtcgttgtatacgaagatgcctggccttaaaagtgatgttggtaaacagttgtcgggtgtgatgcctgctgagggtcagcgttcgggtagcttgtttgctggcgggatgaagttggcgcttggtggtgcggcgatgatgggcgccattaatgttgctaagaagggcctcaagtctatctatgatgtgactattggtggcggtattgctcgcgctatggctattgatgaggcgcaggctaaactgactggtttgggtcatacgtcttctgacacgtcttcgattatgaattcggctattgaggctgtgactggtacgtcgtatgcgttgggggatgcggcgtctacggctgcggcgttgtctgcttctggtgtgaagtctggcgggcagatgacggatgtgttgaagactgtcgctgatgtgtcttatatttcgggtaagtcgtttcaggatacgggcgctatttttacgtctgtgatggctcgcggtaagttgcagggcgatgacatgttgcagcttacgatggcgggtgttcctgtgctgtctctgttggctaggcagactggtaaaacgtctgctgaggtgtcgcagatggtgtcgaaggggcagattgattttgccacgtttgcggctgcgatgaagcttggcatgggtggtgctgcgcaggcgtctggtaagacgtttgagggcgctatgaagaatgttaagggtgccctgggttatttgggtgctacggctatggccccgtttttgaacggcctgcggcagatttttgttgcgttgaatccggttatcaagtctatcacggagtctgtgaagcctttgtttgcgtcggtggatcaggggattcagcggatgatgccgtctattttggcgtggattaatcgtatgccggctatgatcacgagaatgaatgcacagatgcgcgccaaggtggagcagttgaagggcatttttgcgaggttgcatttgcctgttcctaaggtgaatttgggtgccatgtttgctggcggcacggctgtgtttggtattgttgctgccggtgtggggaagcttgttgcagggtttgctccgctggcggtgtcgttgaagaatctgttgccgtcgtttggtgctttgaagggtgctgccggggggcttggcggcgtgtttcgtgccctgggtggccctgtcggtattgtgatcgggctgtttgctgccatgtttgctacgaacgcccagttccgtgccgcggtgatgcagcttgtggctgtggttggccaggcgttgggccagattatggccgctgtgcagcctgtgtttggtctaattgctggtttggtggcacggttggcgccagtgttcggccagattatcggtttggttgccgggctagcggcgcagcttgtgcctgtgattggtatgttggttgcccggctggttcctgtgatcacgcagattattggtgcggtgacgcaggttgctgccatgttgttgccggcgttgatgccggtgttgcaggctgttgttgctgtgatacggcaggttgttggcgtggtcatgcagttggtgccggtgttgatgccggtgattcagcagattttgggtgctgtcatgtctgtgctgccacctatcatcggccttatccggtcgttgataccagtcatcatgtcgattatgcgtgtggtgatgcaggttgttggtgtcgtgctacaggtggtggcccgcattattccggttgtgatgccaattgtgacagctgtgatcgggtttgttgcccgtattgttggtgctgtcgtgtcggctgtggcccgtgttattgccgctgttgcccgtgtcatctcgtgggttgttgcccattttgtgtctggtttggcgcgtatgggttcggtggttcaggctggctggaatcatattagggcgtttacgtctgcgtttattaacggtttcaagtcgatcatttcgggtggtgtgaacgctgttgtggggttttttgcccggcttggttcttcagtggctagccatgtgaggtctggttttaacgcggctcgtggcgctgtttcttctgcgatgaatgctatccggagtgtggtgtcttcggtggcgtctgctgttggcggatttttcgggtcgatggcgtctagggttcgtggtgctgcctcgtccgggtttaacgctgcgaggggtgcggcttcttctgctatgcacgctatgggctcggctgtgtctagtggtgtgcatagtgtgataggttttttccggaatctgcccagcaatattaggggcgctttgggtagtatggggtccctgttggtgtcggctggccgtgatgtggtgtctggtttgggtaatggtattaagaatgctatgagtggcctgttggatacggtgcgtaatatgggttcccagattgcgaatgctgcgaagtctgctctgggtattcattccccgtctcgggtgtttcgtgacgaggttggccggcaggttgttgccggtttggctgaggggatcaccgggaatgctggtttggcgttggatgcgatgtcgggtgtggctggtcggctgccggatgctgtggatgcccggtttggtgtgcgatcgtctgtgggctcgtttaccccgtacgaccggtatcggcgtgctcagggtgagagtgttgtggtgaatgtgaatggcccgacgtatggtgatcctgccgagtttgcgaagcggattgagcgtcagcagcgtgacgctttgaacgcgttggcttacatgtgagtaaaggggtatgcatgtttattcctgacccgtctgatcgtgccggtttgactgtggattggactatggatccgcggtttggcgatgagcgtgtgcttcatttgacggattatacgggtgcgtctcctgtcatgttgttgaatgattcgttgcgcggtttgggtatgcctgaggtggagcatttttctcaaactcatgttggggtgcacggctcggagtggcgcgggtttaatgtgaagcctcgcgaggtgactttgcctgtcctggtgtcgggtgttgacccggatccggtgggcgggtttcgtgacggttttttgaaagcctatgacgagttgtggtccgcttttcccccgggcgaggtgggggagttgtcggtgaagactcctgccggtcgtgagcgtgtgttgaagtgtcggtttgattcggtggatgacacgtttacggtggatccggtgaacaggggttatgcgcgttatctgttgcatttgacggcttatgaccctttttggtatggggatgagcaaaagtttcgtttcagtaacgcgaagttgcaggattggttgggtggcggccctgtcggcaaggatggcacggcgtttcctgtggtgttaacaccgggtgttggttcgggctgggataacctgtctaacaggggtgatgtgcctgcgtggcctgtgattcgtgtcgagggcccgttggagtcgtggtctgtgcagattgatggtttgcgtgtgtcttctgattatccggtggaggagtatgattggatcactattgatacggatcctcgccagcagtcggcgttgttgaacgggtttgaggatgtgatggatcgtttgacagagtgggagtttgcgcctatcccgcctggcggttcgaagagtgtgaatattgagatggttggtttgggtgccattgttgtgtcggtgcagtacaggtttttgagggcttggtgaatggttgatggctggtcttgttccgcatgtaacgttgtttacgccggattatcgccgggtagcccctatcaatttttttgaatcgttgaaactgtcgttgaagtggaatggtttgtccactttggagttggtggtgtcgggggatcattccaggcttgacgggttgactaggccgggtgcacggctggttgttgattatggtggtggccagattttttctggtcctgtgcgtaaggttcatggtgtgggtccgtggcgttcttcgcgggtgactatcacgtgtgaggatgatattcgtctgttgtggcgtatgttgatgtggcctgtgaattatcgtcccggtttggtgggttcggagtggcgtgccgacagggattatgcccactattcgggtgcggctgagtcggtggctaagcaggtgttgggggataatgcttggcgttttccgcctggtttgtttatgaacgatgatgagagtcgtggccgctatattaaggattttcaggcgcggtttcacgtgtttgccgataaactgttgccggtgttgtcgtgggctcggatgactgtcacggtgaaccagtttgagaatgcgaagtttgatcagcgtggtttactgtttgattgtgtgccggctgtgacccggaagcatgtgttgactgccgagtctgggtctattgtgtcgtgggagtatgtgcgtgacgccccgaaggctacgtcggtggttgtgggtggccgcggcgagggcaaagatcggctgttttgtgaggattttgacgcgttggccgaggatgactggtttgatcgtgtcgaggtgtttaaggatgcccgtaacacggattctgagcatgtgcatcttattgatgaggcggagcgggtgttgtccgagtcgggggccacgtcggggtttaagatcgagttggctgagtcggatgtgttgcggtttgggccaggcaatctgatgccgggtgatttgatctatgtggatgtgggctcggggcctattgcggagattgttcggcagattgatgtggagtgtgtatcgccgggtgacggttggacgaaggtgactcctattgcgggggattatgaggataatccgtcggccctgttggctcgccgtgtggctgatttggctgcgggtgtgcgggatttgcaaaaattttagaaaagaattgggggtttgttgtgggtattgtgtgcaaagggtttgatggcgtactgacggagtatgattgggctcaaatgtctggtctgatgggtaatatgccgtctgtgaagggcccggacgattttcgtgtcggcactactgttcagggttccacggtgttgtgtgaggttttgccggggcaggcttgggctcacggggtgatgtgcacgtcgaatagtgttgagacggtgacagggcagctgcctggtcctggcgagacccggtacgactatgttgtcctgtctcgggattgggagcagaatacggccaagttggagattgttcctgggggccgtgcggagcgtgcccgtgacgtgttgagggctgagcctggcgtgtaccatcagcagttgttggctactttggtggtgtcgtctaacgggttgcagcagcagttggataggcgtgctatagcggcccgtgtggcgtttggcgagtctgctgcgtgtgacccgaccccggtggagggtgaccgtgtgatggttccttcgggggctgtgtgggctaaccatgctaacgagtggatgttgttgtcccccaggattgagacgggttctaagcagatccagtttggcgggtctgctgtgtatgcttacacgatcccgtttgagcgccagttcagtagtccgcctgtggtggtggcgtctatggctacggcggctgggggcacgcagcagattgatgtgaaagcctacaatgttactaataaggattttcagttggcgtttattacgaatgacgggtctaagccgaatggtgtgcctgcggtggctaactggattgctgtcggcgtgtaatgcgcggcttgcgggtatgtgacgtgttgtggttgttgtagtggtagggggctgtagtgtcatggcttacacccacactcgtagcctctctttgtaccgctatcgctactgttcttggttcgattcaggcggctacgtacaggtcgaagaagaggctgaggcagttgtctgcgcaggttgatgcgatggaagagtacacgtggaatattcgccatactgttcaccgctataacgcgaatctgccggagaatgttgagcctgtaaagatgcctgatttgcccgagtttttgaaggatactgttgatggtggtggggggtgaattgtgagggagttggaggaagagaagcggcagcgccgctcgtttgagaaggcttccctgatactgttgttcctgtcgcttgcgctgttggcggtggttgctgggggtgctttacgtttcggtgctgtggcttcccagcgggattcggagcaggctaaagcccagtcgaatggtacagccgctaaagggttggctagccgtgtgcggcaggtgtgtgcctctggcgggcaggagtcggtgcggcttcaccggtctggcttgtgtgtggatgctcagcgtgttgagcgtagcgtgcagggtgtgccgggtcctgctggtgtgcgcggcccgcaaggccctgcaggggttgacggccgggatggtgttaatggttcggctgggctggttggccctgttggtccgcagggttccccgggtttgaatggtgtgaagggtcctgacgggctgcccggcgctaacggttcggatggccgtgatggtgtttcgggccgtgcaggcgtggacggtgtgaacggcgctgatggcaaggatggtcgtgatggttcggctggtgagcgcggcgatgtggggccttcgggtcctgccggcccgcaaggcgcacagggggagcgtggtgagcgtggccccgcaggtgtgaacggatccgacggtaaagacggtaaggatggcgctgatgggcgctctgtggtgtctgtgtactgttccgggggccgcctggttgtgaaatatagtgacggtacggcctctaccgtgtcgggttctgcagcctgcgagagtgtgaaaccatcacctgtggttaccgtatcatcccataggtgaacaagaagagggaagggtgttactagtgttggtcgtgtttggtggtggtgtgtggtgagatacattcctgcggcgcatcactctgccggttcgaatagtccggtgaatagggttgtgattcatgcaacatgcccggatgtggggtttccgtccgcttcgcgtaagggtcgtgcggtgtctacggcgaactattttgcttccccatcgtcgggtggttcggcgcattatgtgtgtgatattggggagacggtgcagtgcctgtcagagtctacgattggttggcatgccccgccgaatccgcattctttgggtatagagatttgcgcggatgggggttcgcacgcctcgttccgtgtaccggggcatgcttacactcgtgagcagtggctggatcctcgcgtgtggcctgccgttgagagggcggcggtgctgtgccggcagttgtgtgacaagcatggtgttccgaaaaggaagcttagcgtatccgatctgaaagcgggtaggcggggcatctgcgggcacactgatgtgacggatgcgtggcatcaatcggatcatgacgatccggggccgtggtttccgtgggacaaatttatggctgtggtgaatggccacggcggcggttcaagtagtgaggagttgagtatggctgatgtacaagcgttacataatcagattaaacagttgtcggcacaggtggcccagtcggtgaataagctgcatcacgatgttggtgtggttcaggttcagaatggtgatttgggtaagcgtgtcgaggctttgtcgtgggtgaagaatcctgtgacggggaagctgtggcgcaccaaggatgctttgtggagtgtctggtattacgttttggagtgtcgtagccgtattgacaggctcgagtctgctgttaacggtttgaaaaagtgatggtggtttgttgtgggtaaacagttttggttgggcctgctggagcgggcgttaaagacttttgttcaaacgtttgtggctgtgttgggggtgacggcgggtgtcacgtatactgcggagtcgtttcgcggtttgccgtgggagtcggcgctgattacggccacggttgcagcagtgttgtcggtggctacctcgtttggtagcccgtcgtttgtggccggtaaaccgaaaaccacgcctgtggatgcgggtttggttccaccggatgacaggggcttggttgagccgcactcggtggatgtgtcggatcctggcatgatcgagcctgtagacgatgctgatcttggtggctatgagccgaagcgtgccgccgagtcggaggttggcacggtagagtctactgttgcataagtgaatatagatgtgtgccccagcggtgctgccacgattgtgtggtggttgccgctggggcactatttttgtatattgcggtgtggctatgattcgttgctgtcgatggtgtcttcgagcatctgatacaggtggaggcaggtagagatcgtttcgctggcctggtcgagaacgttccggccgataacgtttttgtggttgtcgcggtggcggatgatagcccacatgatctcgtcggctgccgcctgtaatagtttggcctggtatgcgattccggcgagccagtctagtgcttcctggcttgcataggggctctggttctcgctgttgtcacgggtgttgctgttgtttgtggggtgtcctgcactgtcgcataaccacaggatttcgctgcactcgtctagcgtgtcctggtcgatagcgagatcgtcgaggctgacgtcgttgactgtaaggttcacgttgtcgagggagatgggtacaccgtactggttttcgacactgtcaacaatgttttgtagttgttgcatgttggtgggctgttgttggacgatgcggtgtatcgctgtgttgagggtggtgtaggtgatgttgtgtgtgttgttcatggctgttgtcccatccctgtgctgtcgtcttggtagtatcgactgtttgcgtatcctgtgagggtgatgagtgtttggtctgcccactgtttcacggtttgccgggtgactccgagtcgttgggcggctgtggcatatgtttggtcgtacccgtagacttcccggaatgctgccagcctagctaaatgttttcgctgtttggatggttcacaggtgagtgtgtagtcgtcgatggctagctgtagatcgatcatggtaacgatgttgttgccgtgatgctggggggcggttggtgggggtggcattcctggttcgacggagggtttccatgggccgccgttccagatccattgtgcggcttggatgatgtcggcggtggtgtaggttcggttcactggtcacccctggaataggttgtcgaggttgtctgggttgctggtgttggtgatgtcgaatcgtccgacgcagtggcagtagtcgtacatgagtttgatgatgtgttggtggtctcccaaataggtgtttccgctgatgctgtaggtggctgtgccgtctttgctgatggtgtatttggcggtgatggtttcgggtgtttctgtgttggtgatgatggcggtggtggtggcgcctactgtttgtagcctggtggtttgggttccgtcgtcgaggatggtggtaaccatggtgtgtgttctcccctttcagatgctggtttggttgtcggctagatgaataatatcgggtaaaggtttcggctggtctaggtgttgtatggttttgttggctagccgtttggctaccctgtagcacattttggtgtagtgtttgttgtctaggttgtggtattgttcccgcaccgcaatatatagcaaagagtcttggtacaggtcgtctgcactgattgcggggtagtgtgcggctgttttggtgcatgcccggttgagtgtgcgtagatgatggtctgtggcccacacccacgatgcggtggtggctaggtctgcttttgttggtcgtctgctcatggcatctcttttatctggctatctggtagttgtttggtgttttgttgttgatagtgtagcacacgaacccggggttgccggtggtgcctgtgcggtgccggtaccatgtggattctccttccatggatgggcattggatgaaggtgcgttgtccttgctcggagatttctaggtggtgccggtgtccggccatgaggatgtgggatgtggttccgttgtggaattcttgtcctcgccaccaatcatagtgtttgccggtgcgccattggtgcccgtgggcgtgcagtatccgtgtgcctgccacgtctacggtggtggtcatttcgtctcggctggggaaataaaagtgtaggttggggtattggttggtgagttggtaggcttctgcgatggcgcggcagcagtccacgtcgaaggagtcgtcgtaggtggtgactcctttgccgaatcgtacggcttcaccgtggttgccggggatggatgtgatggtcacatttttgcagtggtcgaattggtggatgagttgcatcatggccatgcgggtgagtctgatttgttcggtgaggggtgtttgtgtgcgccaggcgttgttgcctccttgtgacacgtatccttcgatcatgtcgccgaggaatgcgatgtggactcgttgcggtttgcctgcttgctgccagtagtgttttgcgactatgagggagtgtaggtagtcgtctgcgaagtgtgatgtttctccgccggggatgcctttgccgatttggaagtcgcctgccccgatgacgaaggccgcagtgctgtagtcggtgcgggtgtcttgttcgggttttggaggtgtccattcggctagcttatcaacgagttcgtcgaccgggtaggggtttgttgcgggttggtggtcgatgattttttgtatggatcggcctgtttctccgttggggagtgtccattcggagatgcgtgtgcggcgcacggtgccgttggctagattgtcgtcgatagtgtcgatggcgttgtcgtggttggctagctgggtgaggagccggtctatattatctatcatcgggtatcctcctctcgtggggtggtggcttgtttgcggcggtagtctttaataacggtggcggagatggggtatccggcttcagtgagcatttgggctagctgtgtggctgggatagacctgtcggcgagcacgtctgcagctttgcggccgtagcgttggatcaacgtttcagttttggttgccatggtgtcctatcggttgtgtggtgggttgccatccggtgcggcagtcgccgtcgtgtcctggtttgcgtgtgcaccacgatgttgttccgtctgtgtggtggagtgttttgccgcacatgacgttttgtagatgttctggtagtgcgccgtcactctggttgctggtttgtgtgtcgaatagtgttttctggttggtgaaatgctcggacacggtgccattgtgtacgggtagtatccatgttttccattgttgttgcatccgggtgttccagtggaattgtttggccgcgttcatggcttgtttttcggttttgtagtaaccgacaatgattcgctggtggttgttgtctggctggtgtggccctttccagtattgtgccgcgacggcgtacctgttgttgtcggtgaagcgctgccagcagtacgcgatgatgtgctgtagtgcactatcgggaatgtcttgtgcttggttttcgttgagccattcggcttcgatgatgccgtgtatggcgcgtttgtctttggtggtgggtttgaacgagatactcacgatagcaccggctggtcgtcttgcatgaactggttgaaggtgttgttcccggcgtgttgggcttgtgtgatttgctggtcagtccagtctgggtgttgctgtttcagatagtaccagtggcacgcattgtaggtttcgtcttgtagccgggtgagatggttttcggtgatgatttgtttccacatagcccatgacacgtcgagccggttaagaatttccattgctgggatgttgaattggttcaggaagaggatttcgtgggtgtagtattccttctcgtattgatcccatccgcttcggtgcctgttgggctggtttttggggtaggcttcccggcatactttgtgcaaatgtttggccatgtcttttggtagcctaatgtcggggttggcgcggatcatggatcgcatcccatcataggtggtgccccaggtgtgcatgatgtaggtggggtcttcaccatcagcccatttttctgcacagatggcgaggcggatgcgcctccggtgggcttggctggtgttgcgccggtgggggatggggcacgtgtcgaggggatccatggtgttttatatgcctttcttggtttaggttgcttgtatggttttattgtagcactgtgtctagtgcttgtgtcaaccctgtttttccggcctgcaggtaggtgtctgtgacatcccccagggtgaggggtacatgggttgcttgggggagtgctgcctggagggtttgtgccatctgatggcccgccttgtctgggtctgaccagatgtagatgtggtcgtagccttcaaaaaatttggtccaaaagttttgccacgaggttgcgccgggtagggcgacggccgaccatccgcattgttcgaggatcatggagtcgaattcgccttcgcaaatgtgcatttcggctgccgggttggccatggcggccatgttgtagatggagcctgtgtctcctgccggtgtcaaatatttggggtggttgtgggttttgcagtcgtgcgagagtgagcagcggaaacgcatttttcttatttcggctggccgcccccaaacggggtacatgtatgggatggtgatgcactggttgtagttttcgtggcctgggatggggtcattgtcgatgtatccaaggtggtggtagcgggctgtttcttcgctgatgcctcttgccgagagcaggtcgagtatgttttcgaggtgggtttcgtagcgggcggaggctttctggattcggcggcgttccgcaatgttgtatgggcgtatgctgtcgtacattcgggttttcttcttctagtcgttgttgtagtttggcgagtccgcctccgacaccgcatgtgtggcagtaccagacacccttgtcgaggttgatgctcatggagggctggtggtcgtcgtggaacgggcagaggatgtgttgctcgtttctggaagggttgtatcgtatctggtaggtgtcgaggaggcggcaggtgtcagaggtgtgggaggagctcgttgagggttgataccacataggcttcgctccagggtttgttgcgctgtttcatcactacgagtccgatagtggaattgttttgtttgtttcggtgggtttcgtagttgcgtgcttcccggctggcttgtttcacgaataaggcgaggtggggctggcccgccttggcttcgatcacataggtgtggtttttggttgtgaggatgaggtcgccttcgtcctctttaccgttgaggtggaggcgttcaatattatagccggtgtcgcgtagctggtgtaggagtcgtgtttcccattctgcgccggcccgccggttgcgtgcctgctgtgtggccatagttttttagagtcctttgtgtgttgtggtcatgttccagggctgtttttcggcgagtggcccgaagaatgtgtattccgggtatgctcgtagccgctcgtatcgggtgccgtctgggctggatttgcctgtgcgctgtttgagtacggcgatgcgtgcctctgccggtatcgtgagcccgttgccgttatcctcgccaccatacagggagactccgaggatgagttgtggtttttcggagaggccgtttttgatttctcgccgggctggcgggtgttcgatgtcggttccggttttgtcggtggcatggtgtgtgacaataatggtggagccagtatccctacctaatgctgtgatccattgcatggcttcttgttgtgcctggtagtcactctcgcagtcttgaatgtccatcaggttgtcgataacaatgagtggtggaaaggtgttccacatttccatgtaggcttgcagttccatggtgatgtcggtccaggtgatgggtgactggaatgagaatgtgatgtgttggccgtggtggatgctgtctcgatagtattctggcccgtagtcgtcgatgttttgttgtatctgtgtggtggtgtgttgggtgttgagtgagatgattcgtgtggaggcctcccagggtgtcatgtcccctgatatgtagagggcgggctggttgagcatcgctgtgatgaacatggctagcccggatttttggctgccggaccgccccgcgatcatgaccaaatcccctttatggatgtgcatgtccaggttgcggtagaggggttctagctggggtatgcggggcagttcggctgcggtttgggaggccctctcgaaggatctttggagagagagcatcgggaccttaatctatctgtctatcggttggatgatgttttggtggtcagatggcgtcgatatcgatgtcagcatcagcgggggctgtggtgtcgtctagctggccgttatcgcgcttgtctacgtattcggcaaccttatcgtagatggcgtcatcgaggggtttgagcacgaccgcgttgaacccgtttttggtgcgcactgttgcgagtttgaaggcctgctcctcgccaaggtaggcttcgaggtcgcggatcatggagtgtgggcggtcgttgttgccgcgtgctttctcgataatggcgttggggatggtttctggggttccgttgttgagatcctggagggtgtggaagatggtgacattggcgtagatgcggtctgcggtctgtccgccgtagccttcagtgttgtgttctacgtcgcggattttgaaggcgatggcggtggcgtcctggtttcgggacgggttgaagaaggtgctgttgctgttgttgcggtagtttgcgagtcccattgttgtttcctttactgttttgttggtttttgttgtcttatattggttttatcgggtgaggctgtttcgtttgctgcggaacgcctcggatacgtcactgttgctggtgatggtctttttgtattgtttgaggaggtcggctagctgtgctttgcttgtggctttgttgattttgtcgatgatggtgttgtttccttctgaggcgatgttgtctacgtagtctttggcggcctggttgtatcggtcttggaggatgatggatgctgtggcgatcagtgttgccaggtcccagttccttgccgcggagctgtttttgagtccgcctagcaggtcgatgatagtcttctttacctggtcggcggtgtctccgcggatgacggtccatggtgcggcgtagtcgccaccgtatttgagtgtgatcgttaggcgatcattgtctgtggtgcgctcgtctgtcacttgttttccttttctttactgtctgtttggggtggctgtacgacggtttctaccgggtatctgtacgagtttttgccgttgacggcccagcaggcgtccctgacggggcatcctttacagagtgctgtgacgtgtgggacgaagatgccttcactgattcctttcattgcttgactgtacatggatgatacatgccggtaggtgttgttgtcaaggtcgtagagttcggtggatgtgccctgctcgactgattgctcgtctcccttggtggttgcgggtgtccaaaacatgcctttcgtcacatggatgtcgtgttggttgagcatgtaacggtaggtgtgcagctgcatactgtcggcgggtaggcgtccggttttgaggtcgaggatgaaggtttcgccggtgtcggtgttagtgaagatacggtcgatgtagccgactatttttgtgtcattgtcgaggatggtttctaccgggtattcgatgcctggctggccgtccaggattgcggtgatgtattctgggtggttgcgcctccatgttttccagcggtccacaaaggtggggccgtaaaccatccaccagtcgtagtctttcttgtgtggcccgcccgactcgcacatgtttttgcatattctgccggagggtttgatttcggtgccttcggattcggcgagggcgacttgggtgtcgaaaatgtttttgaaggatgagagtttgtctggcagggcagggtattcggcgggattgtacaggtgtaggtcgtattgttcggtgatgtggtgtatggcgcttccggcgatggtggcgtaccaggtgtggtgttgggtgtggtagccgtgggataggcgccatttttctccgcattcggcccactgggtgagtgaactgtaggagatgtggcctgggtggtggatggttttcgggtattgtgctaggggcattacttgtcgcctttgtgggtgttccatgggttgcgggtgtcttggccggcatcgtgttgctggtaggcgaggagtgcgaggcagtgccaggctgcgtgtgctagatgtggtagcccggattcgtggtcgaggttgtttccttgctgccatgataacaggtgccggtagagggcgtcgacactgtggctccacgggtatcctccggtccagttgttgtcgccgtatttggtggcaccgtagcctgccacggagcctagggcgtgaagggatgcggggtcgatgagggagagcctgcaaagtttgagttcttttcgggcaccggtgttggggtcggtgtacatgcgggttggctcatccatggggtgtgtgctcctttaagtgtgggttactggttgttgttgtgggcgagtgctacggcgagaataatgatggcgagggtttcagcaatcagaataggtgttgtgatcatttagtgtctcggggattgttggtgagggtcgatgcacccaggagggtggcgagggcgcatgcggcgatgatggcgagggctgccttgtgtggggtgccggtggcgtacatccatgtgatgatgccgccttggatccaggctaggctggtgaagaacgtttcgtagctgtgcaactcgatactgttgggtgtgttcatgcttgctcctgaagaatggtgttgatggttttataaatgttgtacaggtcggcttcgatggtttgtagttgtttgatttggtggtcgaggttgatgtttgggttgagggtgttgatgcgggaggcgatgtcggtggctgtgcgtagtgtgccgccggtgtggtgaatgatgtgtgccgtgtcggcgagtccggtggtgacagcgtagcgggataggagaggcatagctgggggtgctcctgggcgggttactgttgcgggttgatgttgaggtcggtgacgtgcgggtggtcttctgttccggtggcgaggcagtggacggtgactgggagtttggatgctcccggctggcggacggtggcgccgtagacgatagtaaaggtgtctttgtgggcgccgatgactttgtggagttggaggtcgatgtcggggtttccgttccatttgacaccctgtgctgcagccatctgctcagccttgtcattgcaggcgtgtgccgcggtgatcatggtgagaccctgtgaggtttcttcaccccgtgtttgggcttgccggtgggttttggcttgttcggcttgtagtgatcggactgcggcggcctgccgggctgttttttcggctttgcgctgttggacggttttgggggtccattcggtgttggctgtggtggcttgtggggcgggttgtgaggcgagtggcgggttgtcgccgggggctggcatgaatgaggctgcggcgatgatggcggctgtggcgcctgcgatggtgtagcctgttttcttgttcatgttttgtgtcccctttccggggtgttgttcgttgctgacatgattaatactttcagcggctgggcccactgtcaaggctgcgctcagtttgtgtgagcgatacttgtgtggctaggggtgatggcttctttcgcccaataggatgtgccaccgctggtccagtatccgagtttgttgcgctgcatgcccttagcgtccatctcgtccacggtgaggcacctgcggcgattggggcctgtcttgaccccgtgatcgcctacccggtgcatgtcgcctgaggtggtactcgtgaatgtttcgtggcagactgtgcagtgttctggtcggtatccgatgatcgtggtgtcacaagtgtggcatgtccattgcatgattgctcctattttccattataagacttcctgtagtgccattttagcgccttgcgggtcttgggggtacaactatataggtcaggtatttctaggtgattctaggctcgttgtgtgcgcctggggtttatcgggcgcacagggtgagcaggtggccaacattgatgcgggtcacattccagtagagttgcgtcgcctcctcactggtgagtggcttccactcgttgtggctgaacacggtgccatcggatgcgatgaacgtgttggggcgtagcttgtggagttcagtctctacacgctgccggtaggcttcggcgaggcccccgaaatcgaggtggtcgcaggagaggttttcgaggcgtgtcaggtcgaagggctcagggcagtccagggtgggggtgtagagctgggtgaagtggttggcgatcttttgcatgattatttccttttcgttgctgataacgttgttgagggtttatcgggtggatgcgacaaggatggcgtctacatcgatcatgtcgatcatgtcgtggagttcctcggcctcattctcagatagatggcgccagtcgggtggcccgtatagggcgccgtcgagggtgacagtccacaggggccggatgagtcgtatggcttcttgtactttagcgtggtacatgcggcgcaccatatccagatcgatgtcgtctgaatggtttccggtgaggccgtggaggctgagcgggtcgatttctgtctgcctgtagaggctggtgaatgatggtgtgatgagtgtgccatccatagggggtgctcctttcggtggtttaggggttgctacggtttctagagtgtgtaggctgcgaccccacagtcaaggtggcgctcaaacccggtgagcgtttcatgggggtgtgtcgggtgtgacagatgatctagcgagtcaaggcgccgagctgagacataagatctctcatctaggtgtgtgagataggccacatcctcctggcttggtgtgcaccctcaagactaccctgccgatctggcgtggagggtgtagcccagaaataccgtttaaagcttcaggggtacgcctaggagcgccttgcagggtgggggctaggtattcatacccccaagcaattctaatcgattctagacgcctcccaggagcccgatacacgatcaaccattcagacgcagatcatcagcccctatcctggttagctaagcctacactatgtggacagtgtgggatgctaagggggaagaaggacacggtaaaagaaagaggggggagcatcagccttcaagccttaaggtcttagcgcttagcaccgatggtcttagcagttagcaccgagccccctcaagggctcggcatcagcccgaacaggcacagccctgaaaggagtacacgccatcagggaaggcttgagagtacgaggagccctagcgacgagtactcgaaagcctgagggaacaccctcagcactgatgggcctagcgtgttcggaaaggacacaagagtgaagtgtgacagctgtccgggagtgaaacccgttccggctaggggtttcagccttaaccaccctcaaaggttacaagactctaagaaaatttaaggaaaagtttaggtttaatttttggacctttactaccaaaaacacccgtttacacccctcaaacccgcctatagagccaaa

SEQ ID NO: 17 - DNA, 30343 bp, Propionibacterium acnes bacteriophage
agaagagtgcatacgtcatatgttgacgtgactggagttcagacgtgttatcttccgatctggtcttgcacgggtgtgcagggggtggttcccgtggggtttgtgggtttttcaccatgggatcaaggtttttgtggtttgttgttggaaactaatgtttggttcgctgcgattgcctttgcttctgttgcatgttctgcagatgatttgcccgttgtcgagggtgttgagtcctcccctgctgacgggtgtgatgtggtcggcttcggggctggttgggagatcatgggtgttccaggtgatggtggctccgcagagtgggcattcggtttggccttgctgtcgggcttgggtgatgagtcttgcccgccagcgccggtgggctgatgatgcggtgcggttggtgtgtgccatcgcgtccccccagtcacctatggcccctgtgagcctctcattgctcctgtaacggcctagaaactgttgggggtaggaatactctaccggtgccctgctgttcgatcctaggccctgttttgtttgtttggcggggtgtttgttttacctcacaccccctggcatgtgagaaagatcacatcgccccccagctgtgtcaaaagagaaggacacgaaagaaaaaagggggtggatgggtgtaagcatttcaggcttagcgctgagcgcctagcgttaaaggacacaggctcagcgggaacacccttaaggttttaaagtcttctacttataatatgtactttaagtcttacctggtgttaaggatttaagtgtgacacgccgtacgccttcagccgaacacactaagcccgaaagggacacaggtgaaagagtgtggggagtgtgcgatgggagcttgcgaccagaagcacacgagacacacggcgaaaagtccatcagcgttgacggtaaaaggttcctcttctcccctgatgaagaaaagaagagaacagagaaagaaccaaagagaaaagagaagtaaagaagttaaccccttacctcttctaaaaacttttataacttataagctttaatacttatattatattattataacctataagctttaagacttataggttataatattaaagtttaagactgatggttaactttaagtacttaaggtttttaaagtcttatagttactttaagtgtttaaagcttataagcctttaagtcttaaacactgatgtgaagtttatatccttaagtgctaagcctttaaggttttatacttaacttaagtgttaaggttatatatttactttaagactttaaagctttaatgtttatttataaccttaagtgttaagctcttaaagcttttatagtaacttagatccttaagggctaagccttgaaggtttgaaagttacttaaagtgtttaagactttaagactgatgccgagcccttgagaggctcggtgctaagctgtcagtaccttagcgctaagcccttaggtctttaagtgtttggtagactgatggtaagcgaggtcgggaagtgcgtcagcactttctggccttgcgtccagctggctacctgtccagcctatcataccccacctgggatgagtcaaactggtggttttggctctataggcgggttcgaggggtgtaaacgggtgtttttggtagtaaaggtccaaaaattaaacctaaacttttccttaaattttcttagagtcttgtaacctttgagggtggttaaggctgaaacccctagtcggaacgggtttcactcccggatagctgtcacacttcactcttgtgtcttttccgaacacgctaggcccatcagtgctgagggtgttccctcaggctttcgagtactcgtcgctcgggctcctcgtactctcaagccttccctgatggcgtgtacccctttcagtgctgtgcctgatcggctgagcccgatgaagctgatgccgagcccttgagaggctcggtgctaagtgctaagaccttaaggcttgaaggctgatactcccccttctttcttttaccgtgtccttctttccccccctgagcatccagcactgttcacatagttgaggcttagctaaccaggataggggctgatgatctatgctgagatggttgatcatgtatcaggctcctgggaggcgtctagaatcgattagaattgcttgggggtatgaatacctagcacccaccctgtaagacgctcctaggctccgtgggaaggctttaaacggtatttctgggctacaccctccacgccagatcgactgggtagtcttgggggtgcacatcaagccaggaggatgtggcctatctcacacagtatgagggtgtagattccatgccacacccatatgaaacgctcaatccaaatgagcgtagccttgactgtggggtctccacctacacactctagaaaccacaacaacccctacaaccaccgaaaggagcacactctcatggatggcacactcatcacaccatcattcaccagcctctatgggcagacagaaatcgacccgctcagcctccatagcctcaccggagaccattcagacgacatggatctggatatggtgcgccgcatgtaccacgctaaagtacaagaagccgtacgactcatccggcccctgtggactgtcaccctcgacggcgccctatacgggccacccgactggcagccactcaccgcggatgaggctgaggaattccacgatctcatcgacatgatcgacgtagacgccatcctcgccgcatctatccgataaaaccacccacacaccatcacccgagaggaaacccgtcatgcagaagatcgccgaccacttcacccagctttacacccccgccagctacgactgccccacacccttcgacctgacacgcctcgaaaacctctcctgcgaccacatggattttgagggcctcgccgaagcctaccggcagagcgtagaagccgaactccacaagctacgccccaacacattcatcgcctccgacggtaccgtgttcagtcacaacgagtggaagccactcactggcggtgaagccacgcaactctactggaatgtgacccgcatcaacatcggaagcctgctcaccctatgcgcccgataacccccagccacacacaatgagcctagaatcgcctagaaatacctgacctatatagttgtacccccaagacccgcaaggcgctaaaatggcacgacaggaagtcttataatagaacataggagcaatcatgcaatggacatgccacaagtgcgatagcacaatcatcggatacaagccagagcactgcacaatctgccacgaaacattcacgagtaccacctcaggcgacatgcaccgggtaggcgatcacggggtcaagacaggccccaatcgccgcaggtgcctcactatcgacgagatggacgccaagggcatgcagcgcaacaaactcggatactggaccagcggtggcacatcctattgggcgaaagaagccatcacccctagtcacacaaggatcgctcacacaagttgagcgcacacttgacatggaacacacccccacaccatgattaatcatgtcagcaacgaacaagccccaccagccggggggcgccacacaaaggacacaccaccatggccaccacactcatcaccccatcgttcacctccctctacagccgccccgaggacgacccactcgacctcacccagctagccggacggcacgccaaccacatcaacctggacgccgccaaacacgcctaccggcactctgtggaagaagccctgcaacactatcgccccgactggaccctcaaccttgacggatcagtcaccggcccacaaaactcgcagccactcaccccagatgaggccgaagacctcgcctgggacatcgacgacatcgacaccgccaccatcctccaagaagccacaaaataacacatataaacacacatcaacacacaagggcccccgacgatgggggacccacccttacacattccaggagacacaactcatgttagccaccatcgttacgtcacactactcgcagctctaccaagatatcccagccgctgccaggatccttgacctcaccatctgcgaggacgaccccaacccgcacatcaactttactagggcggcaggactgtaccggcactctgtggaggaggccatccagacactccgacccgactggtggctcaccgccgacggggccgtctacacccacaacaccgtgcactatctgagcctcgccgagcaaaccaggctcgcccaaaacatcgcaaacatcgacatccaggccatcctcaaagcgtgcatcacccctagccaaaccacatacgctcaagactactgagcgaaacgttgacagtggtagtccagtctggaaatattaaccatgtcagcaacgaacaacaccccggaaaggggacaacagtcatgaacaagaaaacaggctacaccatcgccggcattacagtcgccatcattgccgcagcctccttcctgccagccccggatgataatccgccactcgcctcacagccagccccgcaggccaccacagccaacaccgaatggacacccaaaaccgtccaacagcgcaaagccgagaaagccgccaagcaggccgcgacagtccgctccctccacgccgaacagcagcgcgcccaccggcaagcccaaacacggggtgaagaaacctccacaggtctcaccatgatcaccgcggcacacgcctgcaatgacaaggctgagcaggcagctgccacacagggtgtcaaatggaacggcaacccggacatcgacctccaactccacaaagtcatcggcgcccacaaagacacctttactatcgcctacggcgcaaccatccgccagccgggagcatccaaactacccgtcaccgtccactgcctcgtcaccggaacagaagaccacccgcacgtcaccgacctcaacatcaacccgcaacagtaaccccgtcaaggagcaccccccgctatgcctctcatgtccacctacatggctaaagtcggcctcaccgacatgtgccacatcatccacggtgcagcagtaagcctacgcaccgccaccgacatcgccgcccgcatcgacaccctcaaagacactatcgacctcaaccaagaaatcaccactctcatcaccatcgaaaccacactcaacgacctgtacaccaccatcgcacacaaagcagaaaactaccatgaataacatcacacccaacaacattgagctacacagctacgaaacgttctttaccagcctcgcctggatccaaggcggcatcatcacatggatgtacgcaacaggcaccggccacaaggcagccctcgccatcatcgccgcatgcgccctcaccaccctcctaggcgcctcaaccctcaccaacaatccccgaaacaccaaatgatcaccacacccatcctgatcgcggaaaccctcgccatcatcatcctcgccgtcgcactcgcccacaaccccaaccagtaaccccacacgtaaggagcacacacacaccatggatgagcccaccagcatgtacaccgaccctgatactggcgccaagaaagaactcaaactttgcaggctctccctcatcgatcccaccgccttgcactcgctcggcgaagtagccggatatggtgccaccaaatacggcgacaacaactggaccggcggctacccgtggagccacagcgttgacgccctctaccggcacctcctatcatggcagcaaggacgcaacctcgatgatgaatccgggctaccccacctggcacatgccgcctggcactgcctcgcactcctcgcctaccagcaacaccaggccggccaagacacccgcaacccatggaacacccacaaaggcgaacagtaatgcctctagcacaaaaaccgtccaccatcgacctacccgaccacatctcctactcgtcactgacacagtgggtagaatgcggcgaaaaatggcgactcatgcacggctaccacgccacagcacacacctggtacgccaccatagccggaagcatcatccacgccatcaccgaaacctgggacaaaaacctttaccaccacaacgacacggacatcccctccttcggcgacctgttcaccgaagaaatcatccgccaagtcggtgacggcgaagacattcgcccctccggacgcacctgcaaaaccgtctgcgaaagcggaggacccaacaaaaaagactacgattggtggatgcactacgggcccatctacgtggacaggtggacaacctggaggaagaggcacaccgaatacgagatcgccaccatcaacggccagcccggcatcgaataccccgtcgaagccaccctcgaccatgacacccgcgtggtaggatacattgacaggatcctccacaaccccgccaccggcgaatacaccatcctcgacctcaaaaccggggccataccgcaaggaaaccttcaactctacacctacaggcacctactccacctcaaggatgatatacagccggcctatggcatgttttggacacccagccacaaaacagcctccggcgacaaggacaccggatacgatactgggcccatcccgctcgacaccgaggctgcacgccacatcggcgtcatgtatactagcgccatgcaaggaatcgcgaataacgtgttcataccccacgtcaccccgatgtgcaaaggctgccccgtccgagactcatgctgggcctacggcggcacgcaagcctaccggtaccccaccacaaccatcacccagccacaacatagcaaagaagataaggagcaccagtgaacgacaacaccaatagcggcgatgatcgcatcaccatcacactcaaatacggcggagactacgccgccccatggacagtcatccgcggagacaccgccgaccaagtaaagaaaactatcatcgacctcctcggcggactcaaagacaacaccgtctctgaggattgggatgtggcaaccctgacagcatccgcatccatcatcctccaagaccgatacaaccaggcagccaaaaactacgtaaacaacatcgcatccaaagaaaacgacatcgtcatcgacaaaatcagcgacgcaaccagcaaagcacagttagccgaccttctcaaagaatacaagaagatcatcaccagtaacagtgacgtatccgaggcgttccgcactaaacgaaacagcctcacccgataaaccgacacaaaccaacaaacaaaacaacacaaacagtaaaaggaaacaacagttatgggactcgccaactatcgcaacaacaacagcaacagcaccttcttcaacccctcccgaaaccaggacgccaccgccatcgtcttcaaagtccacgacgtagaacacaacaccgaaggctatggcggacaggttgccgatcgcatctacgctgatgtcaccatcttccacactctagacgacctcaacagcggcaccccagaaaccatccccaacgctattatcgaaaaagtgcgcggcaacaacgaccgcccacactccatgatccgcgatctagaggcataccttggcgaggagcaggccttcaagctcgatcaagtgcgcaccaaaaacgggttcaacgcggtcgtgctcaaaccccttgatgacgccatctacgacctcgtagcagcctacgtcgaccagcgagacagccagcccaaaaccactggtagtgatgatgtagacatcgactccatctgaccattcgcccaaccgcacacagatagattaaggtcccgatgctctctctccaacgatccttcgagagggcctcccaaaccgccgccgagctgccccgcataccacaactagaacccctctaccgcaatctggacatgcacatccacaaaggggacctagtcatgatcgcggggcggtccggcagccaaaaatccgggctagccatgttcatcacagcaatgctcaaccagcccgccctctacatatcaggggacatgacaccctgggaggcctccacacgaatcatctcactcaacacccaacacaccactacacagatacaacaaaacatcgacgactacgggccagaatactatcgagacagcatccaccacggccaacacatcaccttctcattccagtcacccatcacctggaccgacatcaccatggagctacaagcctacatggaaatgtggaacaccttcccacccatcatcgttatcgacaacctgatggacatacaagactgcgaatccgactaccaagcccagcaagaagccatgcaatggatcacagcattaggcagggatactggctccaccatcatcgtcacccaccacgcaacagacaaaaccggaaccgacatcgaacacccgccagcccggcgagaaatcaaaaacggcctctccgaaaaaccacaactcatcctcggagtctcattgtatggtggcgaagacaacggcaacggcctcacgataccagccgaggcacgcatcgccgtattgaaacagcgcacaggcaaatccagcccagacggaacccgatacgagcggctacgagcctaccccgaatacacattcttcgggcccctcgccgaaaaacagccctggaacatgaccacaacacacaaaggactatcatgtcaacacaacaggcacgcaaccgccgagccggagccgaatgggaaacacgactcctccaccaactacgcgacaccggctatgatatagaacgcctccacctcaacggccgcgaagacgaaggcgacctcatcctcacaaccagccacaaaacctacattatcgaggcgaaagcaggccaaccccacctcgccgaattcgtgaaacaagccagccgagaggcgcgcaactacgaaacccaccgaaaccgcgaaaaccagtccaccatcggactcgtcgtcatgaaacaacgcaacaaaccctggagcgaagcctatgtggtatcaaccctcaacgagctcctcccacacctctgacacctgccgcctcctcgacacctaccggatacggtacaacccatccaggaatgagcaacacatcctctgcccgttccacgacgaccaccagccctccatgagcatcaacctcgacaagggcgtctggtactgccacacatgcggtgtcggaggcggactcgccaagctacaacaacgattagaagaagaaaacccgaatgtacgacagcatacgcccatacaacattgcggaacgccgccgaatccagaaagcctcgacccgctacgaaacccacctcgaaaacatactcgacctgctctcagcaagaggcatcagcgaagaaacagcacgctaccaccaccttggatacatcgacaatgaccccatcccaggccacgaaaactacaaccagtgtatcaccatcccctacatgtaccccgtttgggggcggccagccgaaataagaaaaatgcgtttccgctgctcactccaacacgactgcaaaacccacaaccaccccaaatatttgacaccggccggtgatacaggctccatatacaacatggccgccatggcaaacccggcagccgaaatgcacatctgcgaaggcgaattcgactccatgatcctcgaacaatgcggatggtcggccgtagccctacccggcgccacctcgtggcaaaacttttggaccaaattcttcgaaggctacgaccacatctacatatggtccgacccagacaaagcgggagacaagatggcccaaaccctccaggcagcactcccccaagccacccatgtgcccctcaccctcggcgacgtcacagacacctacctgaaaaccggcaaaacagggttgacacaagccctcaacacagtgctacaataaaaccacacaaagcaaacaaacatcacctcaagaaaggtacactaaaacatcatggataccctcgacacatgccccatctcccaccgccgcgacaccagcaaagccgccaggaggcgtatccgcctcgccatctgcgcagaaaaatgggccgacggcgtggacccactccacatcatgcacacctggggcaccacctacgacgggatgcgatccatgatccgcgccaaccccgacatcaaactacccgacgacatggccaaacgtttacacaaagtatgccgggaagcctaccccaaaaaccagcccaacaggcaccgaagcggatgggacgcctacgagaaaaactactacacggaggagatcctcttcctcgaccagttcaacgtgccagccctcgaaatcctcaaccggctcgacgtatcatggaccatgtggaaacacatcatcaacgagcaacacctgacacgtttacagcaggaaaccgacaacgcctgccaatgggcaaacctgcgaaaacaacaccccgacaagaccgatcaggaaatcacccagatgatgtacaataaccaagtaacgttcagcaaggtgatgaaaaccatacccgcataaacatccaccacaccagcatcatatttgcacactctttcacacataggaggcatgatggtcaccacaacccaacactcgatcgacaccaacaggaacaacaccgaccagctgccggagcacctacgtgacgtcatgtgcggccatgccatcatccacaatgccggcgaagtctcatggtgtacacgcaaaccaggacacgacggcgactgccgcacaggatggcaaccaaccacacaacccctaggacatcatggcaaccaaaactgaaacccttatccaacgctacggcaacaaggctgccgacgtgctcgccgacaggtctatccccgcctcatggctagcaaaacagctcacccaggcaggataccccatctccgccaccgttattaaagactatcgccgcaaacaaaccaacatcaccccacaaaaggaagaggatacccagtgatagacaatatagaccggctactcacacagctagccaaccacgacaacgccatcgacaccatcgacgacaatctagccaatggtactgtacgccgcacacgcatctccgaatggacactccccaacggagaaaccggccgatccatacaaaaaatcatcgaccaccaacccgcaaccaacccctacccgatcgacgaactcgtcgataaactagccgaatggacacccccaaaacccgaacaggacacccacaccgactacagcactgcagccttcgtcatcggggcaggagacttccaaatcggcaaaggcatccccggcggagaaaccagccgattcgcagacgactatttacactccctcatagtcgccaaacactactggcaacaggcaggccagccgcaacgagtccacatagccttcctcggcgacatgatcgaaggatacgtgtcacaaggaggcaacaacgcctggcgcacacaaacacccctcacggaacaaatcaggctcacccgcatggccatgatgcaactcgtccacatgttcgaccactgcgccaacgtcaccatcacatccatccccggcaaccacggagaagccgtgcgcttcggtaaaggcgtcaccacctacgatgactcctttgacgtggactgctgccgggccatcgcagaagcctaccagctcaccaacaactaccccaaccttcacttccacttcccccaacgggacgaaatgaccaccaccgtcgacgtggcaggcacacaaatcctgcacgcccacggacaccaatggcgcaccggcaaacaatacgaatggtggcgcggacaagaattccacaacggcaccacatcccacatcctcatggccggacaccggcaccacctcgaaatctccgagcaaggacaacgcaccttcatccaatgcccatccatggaaggcgaatccacatggttccggcaccgcacaggcaccaccggaaaccccggactcgtgtgctacactatcaacaacaaaacaccaaacaactaccagatagccagatgaaagagatgccatgagcaaacgaccaacaaaagcagacctggccaccaccgcatcgtgggtgtgggccacagaccatcatcttcgcacactcaaccgggcatgcaccaaaacagccggacactaccccgcaatcagtgcagacgacctgtaccaagactccctactatatatcgcggtgcgggaacaataccacaacctagacaacaaacactacaccaaaatgtgttacagggtagccaaacggctagccaacaaaaccatacaacacctagaccagccgaaacctttatccgatattattcatctagccgacaaccagacaagcatttaaggagaatcataatggtcacaaccaccctcgacgacggaacccaaaccaccaggctacaaacagtaggcaccaccaccacagccatcatcaccaacaccgaaaaccccgaaaccatcaccgccaaatacaccatcagtaaagacggcacagccacctacagtatcagcggaaacacctacctcggcgaccaccaacacattatcaaactcatgtacgactactgccactgcgtcggacgattcgacaccaccaacactagcaacccagacaacctcgacaacctgttcaggggatgaccagtgaaccgtacctacaccaccgccgacatcatccaagccgcccaatggatctggaacggcggcccatggaaaccatcagtcgagccgggaatgccacccccaccaaccgcgccacaacaccacggcaacaacattgccaccatgatcgatctacagctagccatcgacgactacaccctcgcctgccagccatccaaacagcgaaaacatttggcacggttggcagcattccgggaagtctacgggtatgatcaaacatatgcgtcggccgcccaacgactcggagtcacccggcagactgtgaaacagtgggcagaccaaacactgatcaccctcacaggatacgcaaacagtcgatactaccaagacgacagcgcagggatggaataaaaccatgaacaacacacacaatatcacctacaccaccctcaacacagcgatacaccgtatcgtccaacaacagcccaccaacatgcaacagctggaaaacattgttgacagtgtcgaaaaccagtacggtgtacccatctccctcgacaatgtgaacctgaccgttaacgaagtcagcctcgacgatctcgctatcgaccaggacacgctagacgagtgcagcgaaatcctgtggttatgcgacagtgcaggacaccccacaaacaacagcaacacccgtgacaaccgcgaggaccagagcccctatgcaagccaggaagcactagactggctcgccggaatcgcataccaggcaaaactactacaagcggaggccgacgagatcatgtgggctatcatccgccaccgcgacaaccacaaaaacgttatcggccggaacgttctagaccaggccagcgatacgatctctacctgcctccacctgtatcagatgctcgaagacaccatcgacagcaacgaatcatagccacaccgcatatacagaaatagtgccccagcggcaaccaccacacgatcgtggcagcaccgctggggcacacctttatcaatattcacctgtcacacaacagtagactctaccgtgccaacctcagactcggctgcccgcctcggcacatagccggcaagatcagcatcatccatcggctcgatcatgccaggatccgacacatccaccgaatgcggctcaaccatgcccgtatcgtcgggtggaacaagcccagcatccacagacgtcaccttcggcttgccggccacaaacgacgggctaccaaacgaggtagcaaccgatagtattgcagccaccccggccgtaatcagggcagactcccacggcaaaccgcgaaacgactccgccgtataagtcacacccgccgtcaccccaagcacagcaacaaacgtttgaataaaagttttcagggcacgctcaaacaagcccaaccaaaactgtttacccaccacaaaccaccatcactttttcaaaccgttaacagcagactcgagcctgtcaatacggctacgacactccagcacgtaataccagacactccacaaagcatccttggtgcgccacagcttccccgtcaccggattcttcacccacgacagggcatcaacacgcttacccaaatcaccattctgaacctgaaccacaccaacatcatggtgcagcttattcaccgaaccagtaagctgagcagacaattgtttaatctgatcatgcaaggctttcacatcagccaccgttaactccccactctcatctttgccgttgactacggccataaacctgtcccacggaaaccacggccccggatcatcatgatccgactgatgccacgcatccgtaacatccacatggccgcaaacaccccgcataccagccttcaaatcagccgcagacagtttccttttcggaacattatatttgtcacacaaacgtctacacaggatggcggcacgctccaccgcaggccacacacgaggatccagccactgccccctcgtgtaagcatgccccggcacacggaacgaggcgtgcgaacccccatccgcgcaaatctctatacccaaactatgcggattcggcggggcatgccaaccaatcgtagactccgacaagcactgcaccgtctcactgatatcgcaaacataatgcgccgaaccacccgctgatggagacgcgaaatagtttgccgtagacaccgcccgccctttacgggaggcagacggaaaccccacatccgggcacgtcgcatgaatcacaaccctattcaccggactattcgagccggcagagtgatgcgccgcaggaatgtatctcaccacacaccaccaccaaacactaccatcacagccactcctttctatttgtgggatgatatagtcactataggcgacggtttcacaccctggcaggccaccgagcccgatatggtagaggccgcaccgtcactatatttcacaaccaggcggccctcggaacagtacacagacaccaccgagcgcccatctttaccgtctttaccattcgtgccgtcagcaccggcagaaccctgcggaccctgaggcccaataggaccccgttcaccctgtgcaccttgcgggccggcaggacctgaagggcccacatcaccgcgctcaccggcagaaccatcccgaccatcagcgccgttcacaccgtcagcaccggcacgacctggaacaccatcatggccatccgatccgttcgcaccaggcaacccgtccgggccagccacaccattcaagccaggagaaccctgcggaccaacaggaccaacaggacccgacgaaccgtcaacaccagcgggcccttgcgggccacgtacaccggcaggacccggcacaccctgcacgctacgctcaacacgctgagcatccacacacaagccagactggtgaagacgcaccgactcatgcccaccagaggcacacgcctgccgcacacggctagctaaaccccgagccgctgtaccattagactgggccctcgcctgctccgaatccctttgggaagccacagcaccgaaacgcaaagcacccccggcaaccaccgccaacaacacaagcgacaaaaacaacagtatcagggaagccttctcaaaattgcggcgctgacgcttctcctcctccaactccctcaaccctactcacctccaccatcgacagtatctttcaaaaactcgggcacatcagggagatgcataggctccacatcatcaggaagcccggcgttaaaccttcgcacctcgcgccgcacaccccacgtatactcttccatcgcatccacctgagccgacagccgccgcaaacgcctccgagatttagacgtgaccgcctgaacagaacccaaaaccgtggccaacgcggtacaaattgaggccaccagtgcaggagtaaaccacgacaccacagccccccaacatcacaccatccgccacaacacctgtacagtcacacgccgacagcaatccaattcgcaaccgcaggcacaccattcggcttcgaaccatcattcgtaataaacgccaaactaaaatccttgctagtaatattgtaggctttcacatcaatctgctgcgtaccaccagccgccgtagccatagacgccaccacgacaggcgcactactaaacgggcgaccaaacggaatcgtgtaagcatacacagcagacccgccaaacatgatcgacttagaacccgtctcgatacgcggggacaacagcatccactcgttggaatggttagcccacacagccccagaaggaaccatcacacgatcaccctccattggggtaggatcacacgcagcagactcgccaaacgcaaccctagccgccacggcacgcctatccagctgctgctgcaacccgttagacgacaacaccagggtagctagcaactgttgatggtacacgccaggctcggcacgcaacacatccctggcacgctccgcacgccccccaggaacaatctccaacttggccgtattctgctcccaatcccgcgacaacaccacataatcgtatcgggtctcgccaggaccaggcagctggcccgtcatcgtctcaacactattcgacgtgcacatcaccccatgagcccaagcctgccccggcaaaacctcacacaacactgtggcaccctgaatcgtcgtgccgacacgaaaatcgtccggccctttcacagacggcatattacccatcagaccagacatttgagcccaatcatactcggtcaacacaccatcaaaccctttacacacaatacccacaacaaaccccaatcacttactaaaacttttgcaaatcccgcacacccgcagccaaaccagcaacacgccgcgctagcaacgccgacggattatcctcataatccccagcaataggtgtcaccttcgtccaaccatccccaggcgatacacactccacatcaatctgccgcacaatctccgcaatcgggccagaacccacatccacatagatcaaatcacccggcatcagatggcctggcccaaaccgcaacacatccgactcagccaactcgatcttaaaccccgacatggcccccgactctgacaacacctgctcagcctcatcaatgagatgcacatgctcagaatccgtgttacgggcatccttaaacacctcaacacgatcaaaccactcatcctcggccatcgaatcaacatcctcacaaaacagccgatctttgccctcgccacggccaccaaccaccaccgaagtagccttcggggcgtcacgcacatactcccacgacacaatagacccagactcggcagtcaacacatgcttacgcgtcacagcaggcacacaatcaaatagcaaaccccgctgatcaaacttcgcattctcaaactggttcaccgtgacagtcatccgagcccacgacaacaccggcaacagtttatcggcaaacacgtgaaaccgggcctgaaaatccttaatatagcgtccacgacgctcatcatcggtcataaacaagccaggcggaaaacgccacgcattatcccccaacacctgcttagccaccgactcagccgcacccgaatagtgggcataatccctgtcggcacgccactccatacccaccaaaccgggacgataattcacaggccacatcagcatacgccacaaaagacggatatcatcctcacacgtgatagtcacacgcgaagaacgccacggacccacaccatgaaccttacgcacaggcccagaaaaaatctggccaccaccataatcaacaaccagccgtgcaccaggcttcgtcaacccgtcaagccttgaatgatcacccgacaccaccaactccaaagtggacaaaccattccacttcaacgacagtttcaacgactcaaaaaaattgataggcgccacacgacgataatccggtgtaaacaatgttacatgaggaacaagaccagccatcaactattcaccaagccctcaaaaacctgtactgcaccgacacaacaatggcacccaaaccaaccatctcaatattcacactcttagaaccacccggaggaataggcgcaaactcccactcgatcaaacgatccatcacatcctcaaacccgttcaacaacgcagactgcttacgaggatccgtatcaatagtgatccaatcaaactcctcgacaggataatccgaagacacacgcaaaccatcaatctgcacagaccacgactccaaaggaccctcaacacgaatcacaggccacgcaggcacatcacccctgttagacagattatcccaacccgaaccaacaccaggcgtcaacaccacaggaaacgccgtaccatccttgccgacagggccgccacccaaccaatcctgcaacttcgcgttactaaaacgaaacttctgctcatccccataccaaaacgggtcataagccgtcaaatgcaacagataacgcgcataacccctgttcaccggatccaccgtaaacgtgtcatcagccgaatcaaaccggcattttagcacacgctctttgccggcaggagtcttcaccgacagttcaccctcctcgccgggaggaaaagcagaccacaacgcgtcataggctttcaaaaaaccgtcacgaaacccgcccaccggatccgggtcaacacccgacaccaacaccggcaacgtcacctcgcgaggcttcacattaaacccgcgccactccgaaccgtgcaccccaacatgagtttgagaaaaatgctcaacctcaggcacacccaggccgcgcaacgaatcattcaacaacatgacaggagacgcacccgtataatccgtcaaatgaagcacacgctcgtcgccaaacagcggatccataaaccacgtcacagtcaaaccggcacgatcagacgggtcaggaataaacatgcacaacacccccaatcacacgtaagccaacgcgttcaaagcgtcacgctgctgccgctcaatccgcttcgcaaactcgttaggatcaccatacgtaggtccattcacattcaccacaacactcttatcgttcgcacgccgataccggtcgtacggtgtaaacgagcccacagacgaccgcacaccaaaccgggcatcaacagcatccggaagccgaccagcaacacccgacatcgcatccaacgccaaaccggcattcccggtgatcccctcagccaaaccggcaacaacctgccggccaacctggtcacgaaacaccctcgacggggaatgaatacccaacaccgacttcgccgcattagcaacctgagaacccatattacgcaccgtatccaacaagccactcatagcattccggataccattacctaaaccggacaccacatcacggccagcagacaccaacaaggaccccatactaccaagcgcacgccgaatattgccaggcaaattacggaaaaaacccagcacaccatgcaccccgctagacacagcggaccccatagcatgcatagcagaagaagccgcactccgggcaccattaaacccgcgcacagcaccattccgaaccctagatgccatcgaactgaaaaacccgccaacagcagacgccatcgaagacaccacactacgtatcccgttcatggcggaagaaacagcaccacgggccgcgttaaaaccagacctcacatgggaggcaaccgaagaacccagccgggcaaaaaaccccacaaccgcgttcacaccgccagaaatcaccgacttgaaaccgttaataaacgccgacgtaaacgctctaatatgattccagccagcctgaataaccgaacccatacgcgccaaaccagacacaaaatgggcaacaacccatccaataacacgggccacagcagcaataacacgggcgacagccgacacgacagcaccaacaatacgggccacaaaccctaccacagcagccaccatcggagccacaaccgcaagaatacgggccaccacctgtatcacaaccgcaacaacctgaaccaccacacgcataaccgccgcaatcacaggcatcaacgaccggataaggccgatgataggtggcagcacagacatcacagcacccaaaatctgctgaatcacaggcatcaacaccggcaccagctgcgacacaaccgaaaccacctgccgtatcacagccacaacagcctgaataaccggcatcaacgccggcaacaacattgcagcaacctgtgtcaccgcaccaataatctgcgtgatcacaggaaccagccgggcaacaagcataccaatcacaggcataagctgtgcagccaaaccagccaccaaaccgataatctggccaaaaacgggagccaaccgtgccaccagcccagcagccaaaccaaacaggggctgcacagcggccatgatctgccccaaagcctggccaaccacacccacaagctgcataacagcggcacggaactgggcgttcgtggcaaacattgccgcaaacaagccgatcacaataccgacagggccacccagggcgcgaaacaccccgccaagcccgccagcggcacccttcaaagcaccaaacgacggcaacagattcttcaacgacaccgccaacggagcaaaccctgcaacaagcttccccacacccgcagcaacaataccgaacaccgcggtgccgccagcaaacatggcacccaaattcactttagggacaggcaaatgcattctcgcaaaaatgcccttcaactgctcaaccttggcgcgcatctgtgcattcattctcgtgatcatgcccggcatacggttaatccacgccaaaatagacggcatcatacgctgaataccagcatcgacggcagcaaacatcggcttcacagaatccgtcaccgacttgataaccggattcaacgcaacaaaaatctgccgcaacccgttaagaaacggcgccatagccgtagcaccaagataacccagggcacccttaacattcttcatagcgccctcaaacgtcttaccagacgcctgcgcagcaccacccatgccaagcttcatcgcagccgcaaacgttgcaaaatcaatctgccccttcgacaccatctgcgacacctcagccgacgttttacccgtctgcctggcaagcaaagacagcacaggaacacccgccatcgtaagctgcaacatgtcatcgccctgcaacttaccacgggccataaccgacgtaaaaatagcgcccgtatcctgaaacgacttacccgaaatataagacacatccgcgacagtcttcaacacatccgtcatctgcccgccagacttcacacccgaagcagacaacgccgccgcagtagaagccgcatcacccaacgcatacgatgtaccagtaacagcctcaatagccgaattcataatcgaagacgtgtcagaagacgtatgacccaaaccagtcaacttagcctgagcctcatcaatagccatcgccctagcaataccgccaccaatagtcacatcatagatagacttgaggcccttcttagcaacattgatggcacccaccatggcggcaccaccaagagccaacttcatgcccttagcaaaaagactacccgaacgctgaccctcagcaggcatcaccccagacaactgtttaccaacatccgatttcaaaccaggcatcttcgtatacaaagacacatatgcggaagcaatctcaccagacatacactattcaccccataatattaatctcgcgagacaccccgccaccggcacgaacacgcgccaaaatatcgtccacctgcccagacgtaaaccgggccctacgctcatccgtaggcctcgccacaggctccggctgcccctcactattagcagacctgtaatgatccagcatgtccaacacagcccactcgcaccactcaaacgggcgctgccaaccattaaggtgggccgccaactggctagacgtatcggtacacaacacgccagccagccggacagcctcaccccaacacatctgcgggccaccaacactataaacagaaacaccaaacttggtgcggaaatcgtattcgatggccccacgataatcatcaatcaggccgtggagccaaactattcccccagcgaggcacccttaccttcaggcttatattccatccactcacggaaaatctcggccacacgaaccataggaagcccctccagggcctccacagcatccactggggcggcagcctccaacatagaaaacatcacctcaacctgggcgaaatccgcagattcccccgactgggcaatcttagctgcacggcgaaacacgcgggcaggaacagcctgagccgtctcctccgcatccgccaacacccagctacggtcaccaatcttcaacgtgtaacctgtgtcactcatctatcaacaatccctcaaactatgtgtatcagttattagacggcggattcggatccggctgaggcttcggagaaggcggaaccggaggagtatcagcttttaaagccgtcatccacccccgacccgacaccgcattaccagtcttattaatctgggcagggtaagccttcaacgtcacaccatacccgtacacttcgccattcttacccttgatctcgtcacgatcaatgagctcaacctcggggaaatagtagcgaataacctgatcaccatcaacaatatccatcagtaaagcgtgcacgccagtggtggcaccaggagaaatatcgaacgaacccgaatcggatccggcagtaaccttcgactgccaaaacagctcgataacctccttcttagactcgatcagctggaaagaaatctcgatagaagactcggtagcaaccgtgcgaacaacatccgcattctgccaagccttcaaatcatccgttttacgctcaggcttaatcttaaacccgtcatcagacaaataccctaaagctgtaagcccggaaggaaccgcctccacacccttaatagtatcaccggcgtgagcgtcaccaatataaacgtcgccagtaaccgcggaacgaacattagacgctttacgtgttgcagccataacaacccccattaaatatcaaacaattacattaaaacaaaaacaaatacgtttactcagattcggcaggcctacacaccagctcaaaaagcgaatacacatcaaaacgtgcaccatcaaccagcaaatcaggacccgtagaacgcctacaaaacaccaccggatcaccatcaaccccgtcagccaaaacagcctcaacacgacgcgccaaagacatagcccgatcaggcgtatccgaaaacacattcacgcgcaaaaaaacacgctcacgcacatgcaactgcgggccaccatccaacgccaaccagatcaggtcaccgctgaaatcctcaggcaccgtccctgtacacggtataccagacagccagccatcatccttgagcacgcgtttagcccacacacgcggatcaccgtaaacaatcacgacgccgccccaatcgacctagccaacgtgccatgcttcgcctcaatacgcttcccacccttataggtggtgccgatacgggccacagcctcgacacggtgaacctgaacctccgatgataatccgccacgatattgggccctatcgaaagcattaccgccaacattcgccgagaccgcacgcttgacacgctcgccacgctcagccaacatgccctgcaccccagaagacttcaacacttcacgaatacccggcaagttcagcttcacattcacatcctgagccacaatctatcagcccttcttacgcttcactttaatctgcgtgcccgcatcccagccggacatggggtgatgccacacgataggagacccgtcagcctcccacacaacaccacggatacgccaccggcaacgataatcagcgcccacaacaggctgcttaaaaagcatcgaccaatactcatagtcagagtcacggccggcagcttcatcctcctgcgacatggaagcatagatggccacgttatggtacacggtttctacaggatgcccccaatcctcaaccctgtcgccaagatcatcgacacgaacagtcggctgaagcatcacaaccgtttcaccataaggaaaacgagtcatatcatatctcccacaaagggccatcgcagccgttaatatcagaaccgcacgaacagccgccaccccacaccgtggaacacacctcagaatgattcacactactcctcatggtcggtgtaatagtgaacgccttaccagccccaccatcaccctcacacagcttcttcagcgcggcaatctcagaaggccacaacaaattcgtgggagtattagaccgtgtagtctgggcgaaaggacccgcagactcatactgcacctgaccagaaacaccagtatcattccagcgtagcaaagccctgcgcagaatagccttagcggcatccttatatttgaaatccggtttagcgatacagggggcgacactgacagccacagcctccacatcagcgatcatcgcctcaagcttctctctaggaatatcggcgaaaggctcaatatcctcaggcttcaaaatgatacccatcaacaccaccccctgcacacagcataaacattatcgcaacaaatagatcagttaccagccggaggaggagtcggtgcagccttctccttcacaacagcaaacgaatcaagcgactcgatagccacatacaggacagcctcggcacgaaccataacctcattatggcccttcaaatcacgccccgtctgatccggatcgccatactcgatcagttcgatcgggaagttacgctggaacccccaatgaacacgagagaaatcgccaacaatagcattaacaccagaggcaggcgacatctccggggcgccagaaacagtcgaagaagcaccaacattcagcccgcgccaattatccaaaccggcaaacccggcggcaggatacataggctgaccggcaagcggagaccccttcggatacacctcagtagacagggcaaacgagaacgccggatccaaagcaacaccgttaggaacctgcaaaccggcacccgcaatcagcccaaccgctttaatcagatcagccgtagcgctatcggttgcatcaaccgtcttcttcgtcttatccagcgacaccttgacagccgcagcagtcttacccgtagctggatcaacaccatggaaagcaatcagatcaacagcacgaccaatcgaagcaccaagagccggggaaatcagatcctgcaaaacacccagacggtaatcagcatcagcccacataaactcgtccgagacacgctgctgagtcacaaccttaataggctgcgcagtaaacgctgaaacatcaacagacgcggaaggcttaacctcaccctcgccaacaatcttagcgcgaggaacaccactaaacacggcacccttaacaggaccaaaaatagtcggctgctccggcgaaagcttcgccaaaacaccagaatcgatagcacggtcacgaaccgcaccaatcatagaaccaggaagctcaagcttccctgcagaaagaaaatcgtcagccatcacaaatcatctcctagaattattgacaagagcatccacaaacgcgacaccctcacgtcgtttaacatcatcaacgggggcactccccgcaagacggcgcacacccgcgccaccactactatggtcgatcaaacccttcaaagctttcgcagactcggcaagcgactccttatcgccacccgacaagaaagcgatcgcatcactggacaaaccatactctgaagccacctcgcgcttcacaccctcaagaacaaacccgttgatcctgtcttcgagttcctcattcttgcggcgaagctcatcaatagtagatccagaatcgtcactcgatgtacgaagcttctccaactcggcgaaattacttttagcacgagactcccacttacgggcctccgccttccaatccgtaccagacggcccagaagcctcacccttcacggaaacatcaccggcatgatcatcgccggcagcctgctcatccttcacaacatcaacaatgtctccgccctttccggactcaacagcatcattgtcgacattctgttcctcaacactctgatcggccatagcctaacctacactccttgcggaaaacaacacaatattgttgacccccgtgcgggagacaaccctgtgcaccgataaccggcggcgcacaaccggaaaccacatcaaattatcgcatatcgccaacagtacgcatagccttcaaaatgttgccaggcgactgctgcaacccatgatcatcaacccactcacgggccttctcatacgtcctctgatactcggcatcagccctatttggttcccaagggccaacaacctcaaccaccgtacaaccacaatgatcatgatacttcgaaccaagcggacgcttaccaccacgcttatgacgccgcgtatgaccagtagtaagcgccctttctttggtcgtataatccgacctcgtagccaacatggcacaaaaagcgcacggatcaccatcagtcacccggcgccacgacctaccctgcgcacccgcagaccactcaaccgtgtcacgaccagcattcatgacagcccgattaacacccgccgccatcgcatcaatagtatcattcgccctatccgggtcactcttaagaatcttcatagtcgaaaacgacctagccaaagccgcagcagcatcaaactcgtcatacacgatccaaccaggatcgacaccgttcaaccggcgaaaatccgacacgaacttggctgccatcgatgctgaaccgtcatggccggcacgctccaactccacacacaaacgcacatactgcgaatctgtcatcttcccggaatgccacaaacgacccaactcggcataatagcccgcatacttcccagcaaacctgaccgcctcacgctgatacccggtagcagccaacctcgacacaacacccgaagccatcgcctatcaaacctcgttcgtctgacgcgatatagccccagccagcgcagccaacgggtcagacgactcagcacgatgccgcatcacagcctcaacctgcacatcatcaagccccaacatctccaacaccgtacgagaatcagcaggcaaaataccggcaccaacaagcttcgtcacagcatcagccgtagccgcccgagtaggcgtcgaagcatcacgccaacgcaaacccacatcaccaaaaaaatcggcctcatcaacactcgaatcaagcgccttagcagccaggaaaccaaccgacagccaaccctgaccaaacgacgtctgcctgcgttcagcacgcttcacaagcctcgactcctcggctgccaaagcctccccactaggtgggttagacgtgataaacccgaaatagcgttccggaaccgcagcctccccagccgtcaattgagccaacaatctcatctgatccgaatacggtgtaggactattgacaggaaacgaccccacattcggagtgtcaccatcatcatccttatccacagcccacacagaagccatcgacaggacccaaccaggctgcgaaaactcgtcagccgacacaccagtcacccaacgctgaggatacgcataaaaatcacgattcacagactggccaagcagcgtgcgcacagcctcatccgtgtaagccctaatagacctcgtaatctccgaacgcccatcaatcctcgaagtacggcgacgattcacaataggcacaagcggaacagcaccaagcacattaacgatacggcccgtctcgacccactcacgagacccacgccgctccacctgaacaatcacatcaggaagcaacaactccgcctcaaccacctcaggatcacaagtcggctgaaccaccaaacccgcatccaaacgagacccgtcagccgaaaaccggcctgtgcaattctttggtgactgcggacgaaccaacaccgacccatcatcctgggggataacagccacaaacgacaacccaaaaatcagcgcatccaaatgcacatcacacgacgccgtagcaagccgattcgcagcatacacaccatccaagccgtagccgtcaccattagtccagccaagccaatccagacgctcctccaaagcatccacagctataccaggccacgacaccaccgtctgcacccgctgcaactccggcggaatagccacaccaaggtcacgcacccggctagagccctcatagtagccctcaatgcgacaatgccacgaagacaacctttggatacgatcaaacatgccctcaatcagagccaactcatccgagttcataccacagacacccgcttcctaccagaccgttcacgccgcttcactttaactgttttcgcaccaagatacgccagcgacacagcctccaaaggaacctcagaaccatccttaaacgaggaaccccaaccccacgcagagcctttctttttctgcacagccgacctcacagcaatatccaacatgtcacggcgagaatcagcacgaggatgactgatcacacccgacctgacaccctccaaaaacgcctgacaagcctccacataggtgccagtatcagcaaccaccacgccacggcccggaacaccacgatccatcaacgccttctgcaacaacaccgcaccagacccggcaaccatgatccggtcagtatcaccccaacgaaccgccaaccagtcagccaaccggcccacaccatcaacaatcgttcccgacaggccatcaataacctcaacatgaaccccagcatcagtccggccagcacccgccaaagcaacccgatccccagaacgagaaaacgagacaccaaacactttcccgccaaccagactcgcctcatccaccgaagactgagcccacttatccgccggtatcaccgacgtagcagactggccacgatcccaccagccaagccgctcccgagcaaacccggcagcagacatcgactcatgctcatccgacacagtcccaaaattcaaacgccgccccaacgccggattcgtctccccagccaacttccgccactgccgcgacacatcatccggatcagactcgtcaggaatcgaaaactccgtccacgcaaaccgtttaccacccgacaaagcctgcccgcgaagacgcaacaccacagacccgtcagccaacgggccaggcggcgtgccaaggaaaatctgctgcggatcaccagacggggcagcgcttaccgtaggaagcaaagcctccaactgctcatccgacaactcctgagcctcatcacacaccaaatcatcaaccgtaaaaccgcgagccgaaccccgagaacgggccacaaactcaaccgaaccccaaccgctgcagccacacttcttctcaaaagtcggacaatccgggtgatgcaacacaatagcctcctgaccattcgtcgcccgaatcgacttcaccatacgatacaagtcaggaaactgccgctcattctcaaaaaacgaacgcaaccgcataaacgccttacgagccgacttcaactcgtgagccgtatgcaaaatacggcgaccctgaatagtcgccttaaacaactccacaacctcaaggatcgcgttcttgccattctggcgaggcacaaacaccccacacacacccgaagcaagcctgccattgctaccgacagcaagccaatcatccaacacctgctgctgccacggatcaggcgtcaacccatacgcacgacccaactccccagcatcaccgccagcagtcacctgatacgccgcagccacacggtgacgaggaacctgagaaccaacaacaccagacacctaatcaggcccccttgcgcttcctataccggtcaatcatcgccaccgcagaacccccaccacggccaccagacgccacatcaaccgaataacgatccaacatgcccataaaagccttcacatgagcacgaagcgaagccaccaaatccgcgcgaccctcacgccacacacaatcatgaatcaccgcagcatccatgagaaacagccactcctcatcagacacgtacgatgcacggctatcctcaccccacacatgccaccaacgacgcgtctccccacaccaatcacgactatcaggaagctcaggctgcacaacactcaccaccaacacaaaaagtcgacaaacagacaaatccacaaaagggaggtatttcactagatcggaagagcacacgtctgaactccagtcacgtccacagatctcgtatgccgt

SEQ ID NO: 18 - DNA, 29835 bp, Propionibacterium acnes bacteriophage
ccccccccccccccccccccccccccccccccccccccccccccccccccccccccccccccccccaccgatctttttttttatacaattttatcacgttatagaagattcctggtcgtgactggagttctgtcgtgtgctcttccgttctggtcttgcacgggtgtgcagggggtgtccccggtgggggttggcgggtttgtcaccatggaatcaaggtttttgtggtttgttgttggaattgaatgtttggttgtgttctgttgcctttgcttctgttgcatgttctgcagatgatttgcccgttgtcgagggtgttgagtcctcccctgctgacgggtgtgatgtggtcggcttcggggctggttggtagctggtgtgtgtcccaggtgatggtgactccgcagagtgggcattcggtttggccttgttgtcgggcttgggtgatgagtcttgcccgccagcgccggtgggcggaggatgcggtgcggttagtgtgtgccatcgcgtctccgatcctcgcctagccctgtacgggtcttatttgcctctctaacagcctggaaaccgttgagggcatgaataccttgcccttgccctgctagtcgattctaggggctgttttgttcgtttgagggggtgtcttgaacgtgccggggtgattgttttctccactacccccatgggtgtgagaaagatcacatcgccccccagcggtgccaaaagaagaaggacacgaaagaaaaatgggggtggatgggtgttcgcgtttcaaggcttagcgcctagcgatgtagaatacggctcagcagaaacaccttatagattttaaagtcttctacatataatatacactttaagtcttacctagtgttaagggtgttagcgtgacacgccgtacgccttcagccgaacacgctaagcctgaaagggacacgggtgaaagagtgtgggaagtgtacaaaccgggagcgtgcgaccggtggtacacgagacacacggcgaaagtccatcagcgctgacggttaaaggttcctcttctcccctgatgaagaaaagaagagaagagagaaagtaccaaagagagaagagaagtaaagaagttaaccctttagctcttctaaaacttttataacttataagctttaatacttatattatattattatacctataagctttaagacttataggtataatattaaagtttaagactgatggttaactttaagtacttaaggtctttaatgttttatagttactttaagtgtttaaagcttataagcttttaagtcttaatagttattttaagttttaaagtcttcaacactgatgtgaagtttatatccttaagtgctaagcctttaaggttttatacttaacttaggtgttaaggcttataagcttttaacgtttaactgttaaggttgtatatgtactttaagactttaaaactttaatgtttattgataattttaagtgttaagcttttaaagttttatatgtactttaagtgtttaaggcttgaggactgatgccgagcccttgaggggctcggtgctaagtgttaaggtcttaagggcttagcgcttagccttgaagctttaaagtgtttggtagactgatggatgtaagggtgaaagccgcgtcagcggatttcggccttgcgtccagctggctacctgtccagcctatcataccccacctgggatgagtcaaactggtggatttggctctataggcgggtttgaggggtgtaaacgggtgtttttggtagtaaaggtccaaaaattaaacctaaacttttccttaaattttcttagagtcttgtaacctttgagggtggttaaggctgaaacccctagccggaacgggtttcactcccggacagctgtcacactttactcttgcgtcctttccgaacacgctaggcccatcagtgctgagggtgttccctcaggctttcgagtactcgtcgctagggctcctcgtactctcaagccttccctgatggcgtgtacccctttcagggctgtgcctgttcgggctgatgccgagcccctcaagggctcggtgctaagcgttaaggtcttaaggcttgaaggcgtgaaggctgatgctcccccctctttcttttaccgtgtccttcttcccccacagtatccaacactgtctacatagttgaggcttagctaaccaggataggggttgatggtctgcgtctggatagttgatcgtgtatcaagctcctggaggcgtctagaatcgatcagaatgtgctgggggtataaatacctagcccccaccctgtaaggcgctcctaggcgccgtgtgaaggctttaaacggtatttctgggctacaccttccacgctatatcggcagagtggccttgagggtgcacaccaagccaggaggatgtgatacatctcacatagtataggggtgtagattctatgcccagatatggcacctcgacccccatgatgaaagccaaggtagatctgccgggtcatctaccgaatctgctatcacccagacacacccctcagacgccctagaagggctctagaatcgatcagcagggtcaaccctgcataatcccacccctagaagatttgagacgcttggagaggccatcaaggattcagtgacatccgtcaccttccatgaaacgctcaatccgaatgagtgcagccttgactgtgggtcgcaacctacacactctagaaaccacaacaacccctacaccaccgaaaggaacatcacctatggatggcacactcatcaccccatcctttaccagcttctacgggcccacagaaatcaacccactccaccccgcacacctggcaggatgtgacataggcaacacccacacgtctctcatctgccgcatgtatcgcgccaaagtcgaagaagccgtacgcctcatccggcccctgtggactgtcaccctcgacggcgccgtgtacggcgactacgactggcgccacctctccgagaatgaggccgaggaactccacgacatgatcgacatgatcgatgtagacgccatcatcgccgaagccacacgataaaaaccatccacacacgagaaaaggaactcgtcatgcagaagatcgccgatcacttcacccagctctacacccccgccccggactgccctgagcctttcgacctgacacgcctcgaaaacctctcctgcgaccacctggattttgagggcctcgccgaagcctaccggcagagcgtggaagccgaacttcacaagctacgccccaacacattcatcgcatccgatggcaccgtgttcagccatgatgagtggaagccgctcactggcggtgaagccacgcaactctactggaacgtgacccgcatcaatgtgggccaactcctcaccctgtgtgcccgataaaacacctagccacatccgattcgctcacaatcgttgagcgcagccttgacacagtccaccgcccacaccatgattaatcatgtcagcaacgaacaacaccccagaaaggggaacataaagccatgaacaagaaaacaggctacaccattgccggcgccactctcgccatcatcgccgcagcctccttcttccctgcacccgacgacaatccgccacttgcctcacaaccagcaccacaggccaccacagccaacaccgaatggacacctgaaaccgtccaacagcgcaaagccgaaaagaaagcccgccaggcagccgcagaacagtcactgcgagccgaacagcagaaagcccaccggcaagcccaaacaaggggtgaagaaacctccacaggtctcaccatgatcaccgcggcacacacctgcaatgacaaggctgaacagaaagccgcagcacacggtgtcaaatggaacggcaaccccgacattgatctccaactccacaaaaccatcggtaaagataccttctccatcgtctacggcgcaaccgcgaaacagcccggcgcatccaaactcccagtcaccgtccaatgcctcgtcaccggaacagaagaccacccgcacgtcaccgacctcaacatcaacccgcaacagtaacccgccaaggagcatccccgctatgcctctcctctcccactacgctgtcaccaccggactcgccgacacggcacacatcattcaccacaccggcggcacactacgcacagccaccgacatcgcctcccgcatcaacaccctcaacccagacatcaacctcgaccaccaaatcaaccaactgttatctatcgaaaccgacctgtacaacatttataaaaccatcaacaccattcttcaggagcaagcatgaacacacccaacaacaacattgagttacacagttacgaaacgttcttcaccagcctcgcctggatccaaggcgccatcatcacatggatgtacgcaaccggcaccagccacaaggcagccctcgccatcatcgccgcatgcgccctcgccatcctcctgggtgcatcaacactcacctatcagcccaaagaccacaaatgatcacaacacccatactgatcgctgaaaccctcgccatcattattctcgcagtagcactcgcccacaaccccaaccagtaacccaccaagaaaggcgcacacaccccatggatgagcccacccgcatgtacaccgaccccaacaccggagcccgaaaagaattgaaactctgcaggttatccctcatcgaccctacagccttacacgccctaggctccgtggcaggctacggcgcaaccaaatacggcgacaacaactggaccggaggatacccgtggaaccacagcgtcgacgccctctaccggcacctgttatcatggcagcaaggaaacaacctcgaccacgaatccgggctaccccatctagcacacgcagcctggcactgcctcgcactcctcgcctaccagcaacacaatgcaggccaagacacccgcaacccatggaacacccacaaaggcgacaagtaatgcccctagcacaatacccgaaaaccatccaccacccaggccacatctcctacagttcactcacccagtgggccgaatgcggagaaaaatggcgcctatcccacggctaccacacccaacaccacacctggtacgccactatcgccggaagcgccatacaccacatcaccgaacaatacgacctacacctgtacaaccccgccgaataccctgcactaccagacaaactctcatccttcaaaaacattttcgacacacaagtcgccctcgccgaatccgaaggcacagaaatcaaaccctccggcagggtatgcaaaaacatgtgcgagtcaggcgggccacacaaaaaagactacaactggtggatgatgtacgggcaagcctttgttgaccggtggaaaacatggaggcgcaaccacccagaatacatcaccgcaatcctggacggccagccaggcatcgaatacccggtagaaaccaccctccccgacggcacccagatcgtcggctacatcgaccgcatcttcaccaacaccgacaccggcgaaacctttatactcgacctcaaaaccggccgcctacccgcagacaacatgcagctgcacacataccggtacatgctcaaccaacacgacatccatgtcacgaaaggcatgttttggacacccgccagcagccgcaacgacgacaagtccccgacacaaggcacagcaaccgaactgtacgaccttgacaacaacacctaccggcatgtatcatccatgtacagtcaagcaatgaaaggaatcagtcaaggcatcttcgtaccccacgtcacagcactctgtaaaggatgccccgtcagggacgcatgctgggccgtcaacggcaaaaactcgtatagatacccgatagaaaccaccgtacagccaccagaagccgaaaacaaagaaaaggaaaaccagtgacagacgagcgcaccacagacaatgatcgcctaacgatcacactcaaatatggtggagactatgctgcaccatgggcggtcatccgaggagacacagcagagcaggcaaaacaggccatcatcgacttgctaggcggactcaaagacaacaccgtctctgaggattgggatttggcaaccctgatagcttccgcatccatcattctacaagaccgatacaaccaggcagccaaaaactatgtagacaacatcgcatccaaagaaaacaccatcgtcatcgacaaaatcaacaatgcaacaagcaaggcacagctagccgaccttctgaaacagtacaagaagatcatcaccagtaacagtgacgtttccgaggctttccgcagcaaacgaaacagcctcacccaataaaaaccgacataaaccaacaaaacagtaaaggatacaacaatgggactcgcaaactaccgcaacaacagcaacagtaccttcttcaacccctcccgaaaccaggacgccaccgccatcgccttcaaaatccgcgacgtagaacacaacaccgaaggctacggcggacaggtcgccgatcgcatctacgccgatgtcaccatcttccacaccctccaggatctcaacaacggcaccccagaaaccatccccaacgctattattgagaaagcgcgcggcaacaacgaccgcccacactccatgatccgcgacctagaagcctatctcggcgaagaacaagcattcaaactcgccaccgtacgcaccaaaaacggcttcaacgcggtcgtgctcaaaccattagacgacgccatctacgataaggttgccgaatacgtagacaagcgcgataacggccagctagacgacaccacagcctccactgatgctgatatcgatatcgactccatctgaccaccaatacacaaccaacaaacagatagattaaggtcccgatgctctctctccaaagatccttcgagagagcctcccaaaccgcagccgagctgccccgcataccacaattagaacccctctaccgcaaccaggacatgcacatccacaaaggggatttggtgatgatcgcggggcggtccggcagccaaaaatccgggctagccatgttcatcaccgcgatgctcaaccagcccgccctctacatatcaggggacatgacaccctgggaggcctccacacgaatcatctcactcaacacccaacacaccaccacacagatacaacaaaacatcgacgactacgggccagaatactatcgagacagcatccaccacggcgcgcacatcaccttctcattccagtcacccatcacatggacagacatcaccatggagctgcaagcctacatggaaatgtggaacaccttcccacccatcattgttatcgacaacctgatggacatccaagactgcgaatccgactaccaggcacagcaagaagccatgcaatggatcacagcattaggccgcgacaccggatccactatcatcgtcacccaccatgcaacagacaaaaccggaaccgacatcgaacaccccccggcacgccgcgaaatcaaaaacggcctctccgaaaaaccacaactcatcctcggcgtatcattgtatggtggcgaagataacggcaacggactcaccatccccgccgaggcacgcatcgccgtactcaaacagcgcacaggcaaatccagccccgacggcacccgatacgaacgactgcgagcctaccccgaatacacattcttcgggccactcgccgaaaaacagccctggaacatgaccacaacacacaaaggactatgatggccacacaacagtcacgcaaccgccgggccggcgcagaatgggaaacacgattattgcaccagctacgcgacaccggacacaatatcgaacgcctccacctcaacggtaaagaggacgaaggcgacctcatcctcacaaccggccacaaaacctacattatcgaggcgaaagccgggcaaccacacctagcccaattcgtcaaagaagcaacccttgaggcacgcaactatgaaacacaccgaaataaacaaaacaattccaccatcggactcgtagtcatgaaacagcgcaacaaaccctggagtgaagcctatgtggtatcaaccctcaacgagctcctcccacacctctgacacctgccgcctcctcgacgcctaccggatacggtacaacccgtccaggaacgagcaacacatcctctgcccgttccacgacgaccaccagccctccatgagcatcaacctcgacaagggcgtctggtactgccacacatgcggtgtcggaggcggactcgccaaactacaacaacgactagaagaagaaaacccgaatgtacgacagcatacgcccatacaacattgcggaacgccgccgaatccagaaagcctcggccctctacgaaacccacctcgaaaacatactcgacctgctctcagcaagaggcatcagcgaagaaacagcccgctaccaccaccttggatacatcgacaatgaccccatcccaggccacgaaaactacaaccagtgcatcaccatcccatacatgtaccccgtttggggcggcccagccgaaataagaaaaatgcgtttccgctgctcactcccgcacgactgcaaaacccacaaccaccccaaatacctaaccccggcaggggacacaggctccatctacaacatggccgccatggccaacccggcagccgaaatacacatttgcgaaggcgaattcgactccatgatcctcgaacaatgcggatggccggccgtagccctccccggcgccacctcgtggcaaaccttttggaccaaattcttcgaaggctacgatcgcatctacatatggtccgacccagacccggcaggccaccagatggcccaaaccatccaggcagcactcccccaagccacccatgtgcccctcacactgggggatgtcacagacacctacctgcaggccggaaaaacagggttgacacaagcactagacacagtgctacaataaaacctgtcaacaacacgaaaccagaaaggtacactaaaacatcatggatcccctcgacacgtgcccaatccccaaccggcgcaacattagccaaacagccaggaggcgtatccgcctcgccatctgtgcagaaaaatgggctgatggcgaagaccccacctacatcatacacacctggggcaccacctatgatgggatgcgatccatgatccgcgccaaccccgacattaaactacccgacgacatggccaaacatttgcacaaagtatgccgggaagcctaccccaaaaaccagcccaacaggcaccgaagcggatgggacgcctacgagaaaaactactacacccacgaaatcctcttcctcaaccaattcaacattcccgccctcgaaatcctcaaccggctcgacgtgtcatggtccatgtggaaacaaatcatcaccgaaaaccatctcacacggctacaagacgaaacctacaatgcgtgccactggcactatctgaaacagcaacacccagactggaccgaccagcaaatcacacaagcccaacacgccgggaacaacaccttcaaccagttcatgcaagacgacaggcccgtactgtgagcatcgcattcaaacccaccatcaaagacaaacacgccatacgcaacatcattgtcgaagaatggcttaccgaaaaccaagcacaagacattcccgatagtgtactacagcacattatcgaatactgctggaacaccttcacaaacagtaaccgctacgccgtcgcggcacaatactggcgaggccaaaacccacccgacagtgaacaccagcgcatactagtcggctactacaaaaccgaaaaacaagccgaaaacgcggccaaacaattccactggaacacccggctacaacaacaatggaaaacatggatactcccagtccacaacggcaccgtgtcagagcatttcaccaaccagaaaacactcttcgacacacaaaccagcaaccagagtcacggcgcactgccggagcatctccaaaacgtcatgtgcggtaaaacactcaaccacacagacggaaccgtatcatggtgcacacgcaaaccaggacacgacggcgactgccgcacaggatggcagcccaccacacaacccctaggacatcatggcaaccaaaactgaaaccctgatccaacgctacggcaacaaggctgcagacgtgctcgccgacaggtctatacccgcctcgtggctagcaaaacagctcacccaggcaggataccccatctccgccaccgtaataaaagactaccgccgcaaacaagccaccaccacacacgaggaggaaaaccagtgatagacaacattgaccggctcctcacccagctagccaaccatgacaacgccatcgacaccatcgacgacaatctcgccaacggcaccgtgcgccgcacacgcatctccgaatggaccttaccgaacggagaaacaggccgatccatacaaaaaatcatcgaccaccaacccgcaacaaacccgtatcctgtagacgaactcgttgataaactagccgaatggacacccccaaaacccgaacaagacacccgcaccgactacagcactgcggccttcgtcatcggggcaggagacttccaaatcggcaaaggcatccccggcggagaaacatcacacttcgccgacgactacctacactccctcgcctcagctaaacactactggcaacaggcaggcaaacccgagcgagtccacatcgcattcctcggcgacatgatcgaaggatacgtgtcacaaggaggcaacaacgcctggcgcacacaaacccccctaacggaacaaatccggctcacccgcatggccatgatgcaactcatccacatgttcgaccactgcgccaaccttacagtcacatccatccccggcaaccacggagaagcagtacgattcggcaaaggagtcaccacctacgacgactccttcgacgtggactgctgccgcgccatcgcagaagcctaccagctcaacaaccaataccccaacctacacttccatttccccagccgagacgaaatgaccaccaccgtcgacgtggcaggcacacggatactgcacgcccacggccaccaatggcgcaccggcaaacactatgattggtggcgcggacaagaattccacaacggcaccacatctcatattctcatggccgggcaccggcaccacctagaaatctccgagcaaggacaacgcaccttcatccaatgcccatccatggaaggcgaatccacatggtaccggcacaagacgggcaccaccggaaaccccggactcgtgtgctacactatcaacaacaaaacaccaaacaactaccagatagcccgatgaaagagatgccatgagccgacgaccaacaaaagccgacctagccaccaccgcatcgtgggtgtgggccacagaccatcatctacgcacactcaaccgggcatgcactaaaacagccgcacactaccccgcaatcagtgcagacgacctctaccaagactccctactatatattgcggtgcgggaacaataccacaacctagacaacaaacactacaccaaaatgtgctacagggtagccaaacggctagccaacaaaaccacacaacatttagaccagccgaaacctttacccgatattattcatctagccgacaaccaaaccagcaactgaaaagggaaaacacacaccatggttaaaaccaccatcgacgacggcacccaaaccaccaggctacaaaccgtaggcgccaccaccaccgccatcatcaccaacaccgaaacacccgaaaccatcaccgccaaatacaccatcagtaaagacggcacagccacctacagcatcagcggaaacacctatttgggagaccaccaacacatcatcaaactcatgtacgactactgccactgcgtcggacgattcgacaccagcaacccagacaacctcgacaacctattcaaggggtgaccagtgaaccgaacctacaccacagccgacatcatccaagccgcacaatggatctggaacggcggcccatggaaacccagtgttgaaccgggaatgccaccaccaccaaccgcgccacaacaccacggcaacaacatcgttaccatgatcgatttacagatggccatcgacgactacaccctcacctgccagccatccaaacagcgaaaacatttagctagattggcagcattcagggaagtatacgggtatgaccaaacctacgccacagccgcccaacgactcggagtcacccggcaaaccgtgaaacagtgggcagaccaaacactcatcaccctcaccgagtacgcaaacagcacatactacatgccagacgataactaaggaatggcataaaaaccatggacaacacacacaacatcacctacaccaccctcaacacagcgatacaccgtatcgtccaacaacagcccaccaacatgcaacaactacaaaacattgttgacagtgtcgaaaaccagtacggtgtacccatctccctcgacaacgtgaaccttaccgtcaacgaagtcagcctcgacgatctcgctatcgaccaggacacgttagacgagtgcagcgaaatcctgtggctatgcgacagtgcaggacaccccacaaacaacagcaacacccatggcattccagacgacacacaggcaagcccggaagccatagactggctcgccggaatcgcataccaggcaaaactattacaggcggcagccgacgagatcatgtgggctataatccgccaccgcgacaatcacaaaaatgttatcggccggaacgttctagaccaggccagcgaaactatctctacctgcctccacctgtatcagatgctcgaagacaccatcgacagcaacgaatcatagccacaccgcaatatacaaaaatagtgccccagcggcaaccaccacacaatcgtggcagcaccgctggggcacacacatattcaattatgcaacagtagactctaccgtgccaacctccgactcggcagcgtgtttcggcacatagcctacaccaagatccgcatcatccatcggctcgatcatgccaggatccgacacatcaaccgagtgcggctcaaccaagcccccatcatccggtggaaccaaacccgcatccacaaccgtagttttaggtttgccagccacaaacgacgggctaccaaacgaggtagcaaccgacagtattgcagcaaccccggccgtaatcagagcagactcccacggcaaaccgcgaaacgactccgcagtataagtgacacccgcagtcacacccaacacagcaacaaacgtttgaataaaagttttcagggcacgctcaaacaagcccaaccaaaactgtttacccacaacaaaccaccatcactttttcacatcgttgacagcagactcgagcctgtctatgcggctgcgacactccagcacgtaataccagacactccacaaagcatccttagtgcgccacagcttcccggtcaccggattcttcacccacgacagggcatcaacacgtttacccaaatcgccattctgtacctgtaccacaccaacatcatggtgcagcttattcaccgaaccagtaagctgggcagacaattgtttaatctgatcatgcaaggctttcacatcagccacagttaactcctcactaccactaccgccgcagactacggccataaatttgtcccacggaaaccacggcccaggatcgtcatgatccgactgatgccacgcatccgtcacatccacgtggccgcaaacaccacgtttaccggccttcaaatcggctgcactaagcttccttttcggaacatcatatttgtcacacaaacgtctacacaggatggcagccttctccaccgcgggccacaccctaggatccagccactgctcacgagtgtaagcatgccctggcacacggaacgaggcatgcgaacccccatccgcgcaaatctctatacccaaactatgcggattcggcggggcatgccacccaatcgtagactcactcaaacattgcaccgtttccgaaatatcgcacacataatgcgccgaaccaccagacgatggggaagcaaaatagtttgctgtagacaccgcccgacccttacgcgaggcagacggaaaccccacatccgggcatgtcgcatgaatcacaaccctattcaccggactattcgagccggcagaatgatgcgccgcaggaatgtatctcaccacacaccacccccaaacatcatcaacatcagtaacacccttccctcttattctatttgcgggatgatatagtcaccataggcgacggtttcacaccctggcaggccaccgaacccgatattgcggaagccacaccgtcactatatttcacaaccaggcggcccccggaacagtacacagacacaaccgaacgcccatcacggccgtcagcaccatccttaccgtccttgccattcgtgccatcagcacctgcagggccgcgctcaccctgcgcaccttgcgggccggcaggacccgaaggaccctgatcaccgcgctcaccggccgaaccatcccgaccatcagcgccgtcaacgccgttcacaccgtcagcacctgcacggcccggaacaccatcatggccatcggatccgttcgcgccaggcaacccgtcaggacctttcacaccattcaaacccggggaaccctgcggaccaacagggccaaccagcccagccaaaccattaacaccatcccggccgtcagcacctgcagggccttgagggccgcgctcaccggcagggccaggcacaccctgcacactccgctccgtgcgcacagcatccacacacaaaccagaccggtgaagccgcaccgactcttggccacccgaagcacacacctgcttcacacggctggctaaaccccgagccgctgtaccattcgactgggctttagcctgctccgaatccctttgcgaagccatagccccgaaacgtaaagcacccccggcaaccaccgccagtagtacaagcgacaaaaacagcaacaccagtgaagccttctcaaaattgcggcgctgccgcttctcttcctccaactccctcaaccctactcacctccaccatcaacagtatctttcaaaaactcgggcacatcagggagatgcataggctccaccccgtcaggaagcccggcgttaaaccttcgcacctcgcgccgcacaccccacgtatactcttccattgcatcaacctgagccgacagcctccgcaaacgcttccgagatttagatgttaccgcctgaacagaacccaaaacagtggccaatgcggtacaaatagaggccaccagtgcaggagtaaaccacgacaccacagccccccaacattacaccatccgccacaacacctgtacagtcacacgccgacagcaatccagttagctattgcgggcacaccattcggtttagacccgtcattcgtgataaacgccaaaccaaaatccttgctagtaatattgtaggctttcacatcaatctgtgccgtgcccccagccgccgtagccatagacgccaccacaaccggcggagacgtaaactggcgatcaaacgggatcgtgtaagcatacacagcagaaccaccaaacatgatcgacttagtgcccgtctcaatcctgggggacaacaacatccactcgttagcatgattagcccacacagcccccgaaggcaccatcacacggtcaccctccacaggggtaggatcacacgcagcagactccccaaacgccacacgggcagctatagccctcctgtcaagctgctgctgcaacccgttagacgacaccaccaaagtagccaacaactgctgatgaaacacgccaggctctgcacgcaacacgtcacgggcacgctccgcacgcccaccgggaacaatctccaacttggctgtgttctcctgccaatcccgcgacaggacaacatagtcgtagcgggtctccccagggcccggcagctgctctgtcaccgtctcaacactattcgacgtgcacatcaccccgtgagcccaagcctgccccggcaaaacctcacacaacactgtggcaccctgaacagtagtgccgacacgaaaatcgtccggccctttcacagatggcatattacccatcagaccagacatttgagcccaatcatactcggtcaacacaccatcaaaccctttacacacaatacccacaacaaacccctcatcttttctagaatttttgcaaatcccgcacacccgcagccaaaccagccacacgtcgcgccagcaaagccgacggattatcctcataatcccccgcaaccggtgtcaccttcgtccaaccatcaccaggcgatacacactccacatcaatctgccgaacaatctccgcaataggccccgaacccacatccacatagatcaaatcacccggcatcagattgccaggcccaaaccgcaacacattcgactcagccaactcaatcttaaaccccgacgtggcccccgactcggacaacacccgctcagcctcatctatgagatgcacatgctcagaatccgtgttacgggcatccttaaacacctcgacacgatcaaaccagtcatcctcggccgccgaatcaacatcctcgcaaaacagccgatccttaccctcgccgcggccaccaaccaccaccgaagtagccttcggggcgtcacgcacatactcccacgacacaatcgaaccagactcggcagtcaacacatgcttccgggtcacagccggcacacaatcaaacaccaaaccccgctgatcaaacttcgcattctcaaactggttcacagtgacagtcatccgagcccacgacaacaccggcaacaacttatcggcaaacacgtgaaaccgcacctgaaaatccttaatatagcggccacgactctcatcatcgttcataaacaaaccaggcggaaaacgccaagcattatcccccaacacctgcttagcaaccgactcagccgcacccgaatagtgagcataatccctgtcggcacgccactccatacccaccaaaccgggacgataattcacaggccacatcagcatacgccacaacaggcggatatcatcctcacacgtgatagtcacccgcgaagaacgccacggacccacaccatgaaccttacgcacaggcccagaaaaaatctggccaccaccataatcaacaaccagccgtgcacccggcctagtcaacccgtcaagcctagaatgatccccagacaccaccaactccagcgtcgacaaaccattccacttcaacgacaacttcaacgactcaaaaaaattgataggcgccacacgacgataatccggcgtaaacaatgttacatgcggaacaagaccagccatcaaccattcaccaagccctcaaaaacctgtactgcaccgacacaacaatggcacccaaaccaaccatctcaatattcacactcttcgaaccacccggaggaataggcgcaaactcccactctgtcaaacgatccatcacatcctcaaacccattcaacaacgcagactgtttacgaggatccgtatcaatagtgatccaatcaaactcctcgacaggataatccgaagacacacgcaaaccatcaatctgcacagaccacgactccaacgggccctcaacacgaatcacaggccacgcaggcacatcacccttattagacaaattatcccaacccgaaccaacaccaggcgtcaacaccacaggaaacgccgtaccatccttgccaacagggccgccacccaaccaatcctgcaacttcgcgttactgaaacgaaacttctgcttatccccataccaaaacgggtcataagctgtcaaatgcaacagatagcgcgcataacccctgttcaccggatcaaccgtaaacgtgtcatccaccgaatcaaaccggcaccgcagcacacgctcacgaccggcaggagtcttcacagacaactcccccacctcgcccgggggaaaagcagaccacaactcgtcataggctttcaaaaaaccgtcacgaaacccgcccaccggatccacacccgacaccaggacaggcaaagtcacctcgcgaggcttcacattaaacccgcgccactccgagccatgcaccccaacatgagtttgagaaaaatgctcaacctcaggaacacccaaaccgcgcaacgaatcattcaacaacatgacaggagacgcacccgtataatccgtcaaatgaagcacacgctccggatcattaccaatcaacggcaacatagaccaggtaacagtcaaaccagaacgatcagacgggtcaggaataaacatgaaccacacccctaatcacacgtaagccaacgcgttcaaagcgtcacgctgctgccgctcaatccgcttcgcaaactcgttcggatccccataagtaggcccattcacattcaccacaacactcttctcgttcgcacgccgataccggtcgtacggggtaaacgagcccacagacgatcgcacaccaaaccgggcatcaaccgcatcaggcagccgtcccgccacacccgacatcgcatccaatgccaaaccagcattaccagtaataccctcagccaaaccagcaacaacctgccggccaacctcgtcacgaaacaccctagacggggaatgaatacccaacaccgacttcgccgcattagcaacctgagaacccatattacgcaccgtatccaacaggccactcatagcattccggataccattacccaaaccggccaccacatcacggccagcagacaccaacagggaccccatattaccaagcgcacgccgaatattgccaggcaaattccggaaaaaacccagcacaccatgcacaccactagacaccgcagaccccatagcgtgcatagcagaagaagccgcactccgggcaccattaaacccgcgcacagcaccactacgaaccctagacgccatcgaactgaaaaacccgccaacagcagacgccaccgaagacacaacactccggatagcattcatcgcagaagaaacagcgccacgggccgcgttaaaaccagacctcacatggttagcaaccgaagaaccaagccgggcaaaaaaccccacaacagcgttcacgccaccagaaataaccgacttgaaaccgttaataaacgctgacgtaaacgctctaatatgattccagccattcaggatggccgtgcccatagacctcacgccagacaccagatgattcacaacccatgagatgacacgggtaacagtcccaataatgcgggctgcagcagacacaatagcgccaagaatacgtgcaacaaacccgatcacagctgtcacaattggcatcacaaccggaataatacgggccaccacctgcaacacaaccgaaacaacctgaaccaccacacgcataatcgacatgatgactggtatcagcgaccggatcaggccaataatgggtggcagcacagacatgacagcacccaaaatctgttgaatcacaggcatcaaaacaggcagcaactgcatgatgacgccaacaacctgccgtatcacagccacaacagcctgcaacaccggcatcaacgccggcaacaacatggccgccacctgcgtcaccgcaccaataatctgggtgataacaggaaccagccgggcgacaagcataccaatcacaggcataagccgtgcagccagcccggcaaccataccaataatctggccaaatacgggagccaaccgtgccaccagcccagcaatcaaacccaacagcggctgcacagcggccataatctgccccagggcttgaccaaccatagccacaagctgcataacagcggcacggaactgggcgttcgtagcaaacatggcagcaaacaggccgatcacaataccaacagggccacccaaagcgcgaaacacgccgccaagcccgccagcggcacccttcaaagcaccaaacgacggcaacagattcttcaacgacaccgccaacggggcaaaccctgcaacaagcttccccacaccggcagccacaataccaaacaccgctgtgccgccagcaaacatggcacccaaattcaccttaggaacaggcaaatgcagcctcgcaaaaatgcccttcaactgctccaccttggcgcgcatctgtgcattcattcgagtgatcatagccggcatccggttaatccacgccaaaatagacggcatcatccgctgaatcccctgatccaccgacgcaaacaggggcttcacagaatccgtcaccgacttgataaccggattcaacgcaacaaaaatctgccgcagaccgttaagaaacggagccatagccgtagcaccaagataacccaaggcgcccttcacattcttcatagcgccctcaaacgtcttaccagacgcctgcgcagcaccacccatgccaagcttcatcgcagccgcaaacgtggcaaaatcaatctgccccttcgacaccatctgcgacacctcagccgacgttttacccgtctgcctggcaagcaaagacagcacaggaacacccgccatcgtaagctgcaacatgtcatcgccctgcaacttaccgcgagccatcacagacgtaaaaatagcgcccgtatcctgaaacgacttacccgaaatataagacacatccgcgacagtcttcaacacatccgtcatctgcccgccagacttcacacccgaagcagacaacgccgccgcagtagaagccgcatcacccaacgcatacgacgtacccgtcacagcctcaatagccgaattcataatcgaagacgtgtcagaagacgtatgacccaaaccagtcagtttagcctgcgcctcatcaatagccatcgccctagcaataccgccaccaatagtcacatcataaatcgacttgaggcccttcttagcaacactaatagcgcccatcattgcggcaccaccaagcgccaacttcatgcccttagcaaaaagactacccgaacgctgaccttcagcaggcatcaccccagaaagctgtttaccaacatccgccttcaaaccaggcatcttcgtatacaacgacacatatgcagaagcaatctcaccagacatacactattcaccccataatattaatctcgcgagacaccccgccaccggcacgaacacgcgccaaaatatcgtccacctgcccagaagtaaaccgggccctacgctcatccgtaggcctcgccacaggctccggctgcccctcactattagcagacctgtaatgatccagcatatccaacacagcccactcgcaccactcaaacgggcgctgccaaccattcaggtgggccgccaactggctagacgtatcggtacacaacacgccagccagccggacagcctcaccccaacacatctgcgggccaccaacatcataaaccgagcaaccgaaccgggttctccaatcatattcgatggccccacgataatcatcaatcaggccgtggagccaaactattcccccagcgaggcacccttaccgtcaggcttgtattccatccattgacggaaaatctcggcaacacgaaccataggaagcccctccagggcctctaccgcatcagctggggcggcagcctccaacatagaaaacatcacctcaacctgggcgaaatccgcagactcccccgactgggcaatcttagctgcacggcgaaacacgcgggcaggaacagcctgcgccgtctcctccgcatcagccaacacccagctacggtcaccaatcttcaacgtgtaacctgtgccactcatctatcaacaatcccctaaaatcgtgtatcagttctcagacggcggattcggatccggctgaggcttcggagaaggaggagtatcagcttttaaagccgtcatccacccccgacccgacaccgcattaccagtcttattaatctgagcagggtaagccttcaacgtcacaccatacccgtacacttcgccattcttacccttaatctcgtcacgatcgataagctcaacctcagggaaatagtagcgaataacctgatccccatcaacaatatccatcaacagggcatgaacacccgtcgtagcaccaggagaaatatcgaacgaacccgaatcggatccggcagtaaccttagactgccaaaacagctcgataacctccttcttcgactcaatcagctggaaagaaatctcgatagacgactctgtagccacagtgcgaacaacatccgcattctgccaagccttcaaatcatccgttttacgctcaggcttaatcttaaacccgtcatcagacagataccctaaagctgtaagcccggaaggaaccgcctccacacccttaatagtatcacccgcgtgcgcggcaccaatatagacgtcacccgtaacagccgagcgaacattagacgctttacgtgttgcaaccatcacaacccccattaaatatcaaacaattacattaaaacaaaaacaataagcttattcagactccgcaggcctgcatatcagctcaaaaagcgaatacacatcaaaacgtgcaccatcaaccagcaaatcagggccagtagaccgtttacagtacaccaccggatcaccatcaacaccgtcagccagcacagcctcaacacgacgcgccaacgacatagcacgatctggcgtatcagaaaacacattcacccgcaaaaacactcgctcacgaacatgcaactgcgggccaccatccaacgccaaccaaatcagatcaccgctgaaatcctcagacaccgtccccacacaaggtatcccagacagccagccatcatccttgagcacgcgtttagcccacacacgcggatcaccgtaaacgatcacgacgcagccccaatcgaacgagccaacgtgccatgcttcgcctcaatccttttaccacccttataggtggtgccaatcctcgccacagcctcaacacggtgaacctgcacctccgacgacaaaccattacggtattgggtcttatcgaaagcgttaccgcccacattcgccgaggctgcacgcttgacacgctcgccacgctcagccaacatggcctgcaccccagaagacttcaacacctcacgaatacccgacaagttcagcttcacattcacatcctgagccactacctatcagcctttcttacgcttcacattaacctgcgtaccagcatcccagccagacatcggatgatgccacacgataggagacccgtcagcctcccacacaacaccccggatacgccaccggcaacgataatcagcgcccacaacaggctgcttgaaaagcatcgaccaatgctcataatccgagtcacgccccgcggcctcatcctcctgcgaaacggaagcatagatggccacgttatggtacacggtttctacagaatgaccccaatcctcaaccttgtctccaagatcatcgacacgaacagtcggttgaagcatcacaaccgtttcaccataaggaaaactggtcatatcatatctcccacaaagggccagcgtagccgttaatattcgacccgcacgagcaaccctcaccccacaccgtggaacacacctcagaatgattcacactactcctcatggtcggtgtaatagtgaacgctctaccagccccaccatcaccctcacacagcttcttcaacgcggcaatctcagaaggccacaacaaattagtgggagtactagaccgtgtagtctgagcaaaaggacccgcagactcatactgcacctgacccgaaaccccggtatcgttccagcgcaacaaagccctacgcagaatagccttagcggcatccttatatttgaaatccggtttagcgatacagggggcgacactgacagcgacagcctccacatcagcaatcatcgcctcaagcttctctctaggaatatcggcgaaaggctcaatatcctcaggcttcaaaatgatacccatcaacaccaccccctgcacacagcataaacattatcgcaacaaatgaatcagttctcggccggcggattaggcttcggggcagccttctccttcacaacagcaaacgaatcaagcgactcgatagccacatacaggacagcctcggcacgaaccataacctcgttatggcccttcaggtcacggccagtctgatccggatcgccatactcgataagctcgatcgggaagttacgctggaaaccccaatgaacacgagagaaatcacccacaatagccttaacaccagaggcaggcgacatctccggggcacccgaaacagtcgaagaagcaccaacattcagcccacgccaattatccaggccggcaaacccggcggcaggatacataggctgaccggcaagcggagaccccttcggatacacctcggtagacagagcaaacgagaacgccggatccaaagcaacaccgttaggaacctgcaaaccagcaccagcaatcagcccaaccgccttgaccagatcagccgtagcgctatcggtggcatcaacaacattcttcgtcttatccagcgaagtatgcacagcggcagccgctttaccggtggcaggatcaataccgtggaaagcaatcagatccacagcgcgaccaatcgaagcaccaagagcaggcgaaatcagatcctgcaaaacacccagacggtaatcagcatcagcccacataaactcgtcgcttacgcgctgctgagtcacaaccttgataggctgcgcagtaaacgccgaaacatcaacagacacggaaggcttaacctcgccctcaccaacaatcttcgcgcgaggaacaccactaaacacggcacccttcacaggcccgaaaatagtcggctgctccggcgacagcttcgccaaaacaccagaatcgatagcacggtcacgaaccgcaccaatcatagaaccaggaagctcaagcttccctgcagaaagaaaatcgtcagccatcacaaatcatctcctagaattattgacaagagcatccacaaacgcgacaccctcacgtcgtttaacatcatcaacgggggcactccccgcaagacggcgcacacccgcgccaccactactctggtcgatcaaacccttcaaagccttagcagactccaccaatgcttcacgatcgccgccgtgcaagaaagcgatcgcatcactggacaggccacactcggcagccacctcgcgcttcacaccctcaagaacaaacccgttgatcctgtcttcgagttcctcattcttgcggcgaagctcatcaatcacagaccccgcatcaccatccgaggcgcgaagcttctccaactcggcgaaattacttttagcacgagactcccacttacgggcctcagccttccaatccgtgccagaagaagactcctccttcacggaaacatcaccagcatgatcatcgccggcagcctgcccatccttcacaacatcaacaatgtctccaccctttccgggctcaacagcatcattgtcgacattctgttcttcaacactctgatcggccatagcctaaccttacactccttgcggaaaacaacactaacttgttgacccccgtgcgggagacaaccctgtgcaccgataaccggcggcacacaaccggaaaccacatcacattatctcatgccgccaacagtacgcatagccttcaaaatattgccaggcgactgctgcaacccgtgatcatcaacccactcacgggccttctcatacgtcctctgatactcggcatcagcactatttggttcccaaggaccaacaacctcaaccaccgtacacccacaatgatcatgatacttcgaaccaaacgggcgcttaccaccacgcttatgacgccgcgtatgaccagtagtcagtgccctttccttagtcgtataatccgacctcgtagccaacatggcacaaaacgcgcacggatcaccatcagtcaccctgcgccatgacctaccctgcgcacccgcagaccactcaaccgtgtcacggccagcattcatcacagcccgattaacacccgccgccatcgcatcaatcgtgtcattcaccctatccgggtcactattcataatcttcatagtcgaaaacgacctagccaacgcggcggcagcatcaaactcgtcatacacaatcaaacccggatccacaccattcaaccggcgaaaatccgacacaaacctggcagccaacgacgccgaaccatcatggccggcacgctccaactccacacacaaacgcacatactgcgcatctgtcatcttcccggaatgccacaaacgacccaactcggcataatagcccgcatacttcccagcaaacctgaccgcctcacgctgatactcagtcgcagcaagcctcgacatagcacccgaagccatcacctatcaaacctcgttagtctgacgagaaatagccccagccagcgccgccaacggatccgacgactctgcacgatgtcgcatcacagcctcaacctgcacatcatccaaacccaacatctccaacacagtacgagaatcagcaggcaaaataccggcaccaacaagcttcgtcacagcatcagccgtagccgccctggtaggcgtcgaagcatcacgccaacgcaaacccacatcaccgaaaaacgcggcctcatcaacactcgaatcaagcgcccgggcagccaggaaaccaaccgacaaccagccctgaccaaacgacgtctgcctccgttcggcacgcttcacaagccgagactcctcggcagccaaagcctccccactaggcgggttagacgtgataaacccgaaatagcgttcaggaacagccgcctcacccgcagtcaactgcgccaacagccgcatctgatccgaatacggtgtaggcgaattcacaggaaacgaccccacattcggagtgtcaccatcatcatccttatcaacagcccacacagaagccatcgacaacacccagccaggctgcgaaaactcatcagccgacacacccgtaacccacctttgcggataggcgtagaagtcacgattcacagactgcccaagcaaagtcctaaccgcttcatccgtgtaagcacgaatcgaccgagtgatctccgaacggccatcaatcctcgaagtacggcgacgattaacaacaggcaccaacggaaccgcacccaacacattctcgatacggcccgtctcaacccactcacggctacctcgccgctccacctgaacaatcacatcaggaagcaacaactccgcctcaacaacctcaggatcacacgtctgctgcaccacaaggccagcatccaaacgagacccatcggcagaaaaccggccagtacaattctttggtgactgcggacgaaccaacaccgacccatcctcttgggggataacagccacaaacgacaacccaaaaattagtgcatccaaatgcacatcacacgacgccgtagcaagccgattcgcagcatacacaccatccaggccgtagccgtcaccattagtccagcccagccaatccagacgctcctccaaagcatccaccgcaataccaggccacgacaccaccgtctgcacacgctgcaactccggcggaatagccacaccaaggtcacgcacccgggcagaaccctcatagtagccctcaatgcgacaatgccacgaagacaacctttggatacgatcaaacatgccctcaatcaaagccaactcatccgagttcataccacagacacccgcttcctaccactacgctcccgacggccacgacgaacacgtttagcccccaaaaacgccaacgacacagcctccaaaggaacctcagaaccatccttaaacgaggaaccccaaccccacgcagaacctttcttcttctgcacagccgacctcacagcaatatccaacatgtcacggcgagaatcagcacgaggatgagaaacactcccagacctcacaccctccaggaacgcctgacacgcctccacatacaccccagtatcagcaaccaccacgccacgacccggaacaccacgatccgtcaacgccttctgcaacaacaccgcaccagacccggcaaccataatcttttccgtatcaccccaacgcaacgccaaccaatcagccagctggcccacaccatcaacaatcgtgccagacaggccatcaatcacctcaacatgaaccccagcatcagtcctgccagcaccagccaacgcgacacgatccccagaacgagaaaacgagacaccaaacaccttgccgccaaccagagccgcctcaaccacagccgactggacccacttatccgccggaatcaccgacgaagcagactggccacgatcccaccagccaagccgctcccgagcaaacccggcagcagacatcgactcatgctcatccgacacagtcccaaaattcagacgccgccccaacgccggattagtgtcaccagcaagcttccgccactgccgcgacacatcatccggatcagactcgtcaggaatcgaaaactccgtccacgcaaaccttttaccacccgacaaagcctgcccacgaagacgcaaaaccacagacccgtcagccaacgggccaggcggcgtacccaaaaaaatctgctgaggatcaccagacggggcagcgctcacggtaggaagcaaagcctccaactgctcatccgacaactcctgagcctcatcacacaccaaatcatcaaccgtaaacccgcgagcagaaccccgagaacgggccacaaactcaaccgaaccccaacccggacaaccacacttacgctcaaacgtggcacaatccggatgatgcaacacaatagcctcctggccattcgtcgcccgaatcgacttcaccatacgatacaagtcaggaaactgccgctcattctcaaaaaacgatctcaaccgcataaacgccttacgagccgacttcaactcgtgagccgtatgcaaaatacggcgaccctgaatagtcgccttaaacaactccacaatctccaaaatagcgttcttgccattctggcgaggcacaaacaccccacacacacccgcagcaagcctgccattgctacccacagcaagccaatcatccaacacctgctgctgccacggatcaggcgtcaacccatacgcagcccccaaagcaccagcatccttgccagcagacaccgaatacgccgcagccacccggtgacgaggaacctgagacccaacaacaccagacacctaatcaggcccccttacgcttccgataccggtcaatcatcgccaccgcagaacccccaccacggccaccagacgccacatcaaccgaataccgatccaacatgcccataaaagccttcacatgagcacgaagcgaagccaccaaatccgcgcgaccctcacgccacacacaatcatgaatcaccgcagcatcaaggagaaacagccactcctcatcagacacatacgatgcgcggctatcctcaccccacacacgccaccaacgacgcgtctccccacaccaatcacgagacccaggaagctcaggctgcacaacactcaccaccaacacaaaaagtcgacaaacagacaaaaccacaaaagggaggtatttcactaagatcggaagagcacacgtctgaactccagtcacgaccaggaatagcgtttggcgtccagcgcgtgaaaaaaaaaaaaaaggggggggggggggggggggggggggggggggggggggggggggggggggggggggggggggggggggggggggggg

SEQ ID NO: 19 - DNA, 29917 bp, Propionibacterium acnes bacteriophage
ctgtttgggttggttgttgtggtttctagagtgtgtaggttgtgatccacagtcaaggctgcgctcattcggtgtgagcgtttcatatgggtgtggcatggaatctacacccccatactgtgtgagataggccacactcgcctggcttggtgtgcaccctcaagactactccgccgatctggcgtgaagggtgtagcccagaaataccgtttaaagccttcacacggcgcctaggagcgccttacagggtgggggctaggtattcatacccccaagcaattctgatcgattctagacgcctcccacagcctcatacacgatcaaccatctcgacatagaccatcaacccctatcccgcttagctaagcctcaactatgtggacagtgctggatgctcagggggaagaaggacacggtaaaagaaagaggggggagcatcagccttcaagccttaaagtcttagcgcttagcaccgatggtcttagcagttagcaccgagccccctcaagggctcggcatcagcccgaacaggcacagctcatcaggcacagccctgaaaagggtacacgccatcagggaaggcttgagagtacgaggagccctagcgacgagtactcgaaagcctgagggaacaccctcagcactgatgggcctagcgtgttcagaaaggacacaagagtgaagtgtgacagctgtccgggagtgaaacccgttccgactaggggtttcagcctgaaccaccctcaaaggttacaagactctaagaaaatttaagaaaactcttaggaagaaagttgtgttcatatccccctaaaaacacccaaaatagccctcaaacccgcctatagagccaaaaccaccagtttgactcatcccaggtggggtatgataggctggacaggtagccagctggacgcaaggccggaaagtgctaacgcacttcccaacctcgcttaccatcagtctaccaaagacttaaaagcttcaaggcttagcgttaagcccttaagaccttaacgctgagcaccgagccccctcaagggctcggcatcagtcttaaagccttaaacactttaagtaactttaaaatcttaacagcttagcccttaaggatctaagttactataaaagctttaagagcttaacacttaaagctataaataaacattaaagctttaaagtcttaaagtaaatatataaccttaacagttaagttaagtataaaaccttaaaggcttagcacgtaaggatataaacttaacatcagtgtttaagacctaaagagttaaagtaactattaagacttaaaggcttataagctttaaacacttaaagtaactataagactttaaaaaccttaagtacttaaagttaaccatcagtcttaaactttaatattataacctataagctttaagacttataggttataataatataatataagtattaaagtttataagttataaaagtttttagaagagttaaggggttaacttctttacttctcttctctctttggttctttctctcttctcttcttttcttcatcaggggagaagaggaacctttaccgtcaacgctgatgggcttttcgccgtgtgtctcgtgtgcttctggtcgcaagctctcatcgcacactccccacactctttcacccgtgtccctttcaggcttagcgtgttcggctgaaggcgtacggcgtgtcacgcttaaacccttaacaccaggtaagacttaaagtacatattataagtagaagactttaaaaccttaagggtgttcccgctgagcctgtgtccttcaacgctaagccttaagtgctaagcgttgaaacgtgaacacccatccacccccatttttcttccgtgtccttcttcttttgacaccgctggggggcgatgtgatatttttcacacgccagggggtaggagaagaaaacaaacaccccggcacaaacagaacaccccgccaaacgcacaaaacagggcctaggatcgaacagcagggcaccggtagagtattcctacccccaacagttcccaagcccttacaggagcaatgagaggcccacaggggccataggagatcaggggacgtgatggcacacaccaaccgcacagccagccaagcccaccggcgctggcgggcaagactcatcacccaagcccgacaacaaggccaaaccgaatgcccactctgcggagccaccatcacctggaacacccatgatctgccaaccagccccgaagccgaccacatcacacccgtcagccggggaggactcaacaccctcgacaacgggcaaatcatctgcagaacatgcaacagaagcaaaggcaatcgcagcgaaccaaacattagtttccaacaacaaaccacaaaaaccctgatcccatggtgaaaaaacccacaaaccccacgggaaccaccccctgcacacccgtgcaagaccacgtacggcttagtgaaatacctcccttttgtggttttgtctgtttgtcgactttttgtgttggtggtgagtgttgtgcagcctgagcttcctgagtctcgtgattggtgtggggagacgcgtcgttggtggcgtgtgtggggtgaggatagccgcgcgccgtatgtgtctgatgaggagtggttgtttcttatggatgctgcggtgattcatgatgtggtgtggcgtgagggcagggcggatttggtggcttcgcttcgtgctcatgtgaaggcttttatggtcatgttggatcgttattcggttgatgtggcgtctggtggccgtggtgggggttctgcggtggcgatgattgaccggtataggaagcgtaaaggggcctaatgtcgagtgttgttggttctcaggttcctcgtcaccgggtggctgcggcgtattcggtgtctgctggtggtgatgcgggtgagcttggtagggcttatgggttgacgcctgatccgtggcagcagcaggtgttggatgattggcttgctgtgggtggtaatggtaggcttgcttctggtgtgtgtggggtgtttgttccgcggcagaatggcaagaatgctattttggaggttgtggagttgtttaaggcgactattcagggtcgccgtattttgcatacggctcacgagttgaagtcggctcgtaaggcgtttatgcggttgcggtcgttttttgagaatgagcggcagtttcctgacttgtatcgtatggtgaagtcgattcgtgcgacgaatggccaggaggctattgtgttgcatcatccggattgtgccacgtttgagcgtaagtgtggttgtccgggttggggttcggtggagtttgtggctcgttctcggggttcggctcgcgggtttacggttgatgatttggtgtgtgatgaggctcaggagttgtcggatgagcagttggaggctttgcttcctacggtgagcgctgccccgtctggtgatcctcagcagatttttttgggtacgccgcctgggccgttggctgacgggtctgtggtgttgcgtttgcgtgggcaggctttgtcgggtggtagaaggtttgcgtggacggagttttcgattcctgacgagtctgatccggatgatgtgtcgcggcagtggcggaagcttgcgggggatactaatccggcgttggggcggcgtctgaattttgggacagtctcggatgagcatgagtcgatgtctgctgccgggtttgctcgggagcggcttggctggtgggatcgtggccagtctgcttcgtctgttgttccggcggataagtgggttcagtcggctgtgggtgaggcggctctggttggtgggaaggtttttggtgtctcgttttctcgctcgggggatcgtgtcgcgctagctggtgctggcaggactgatgctggtgttcatgttgaggtgattgatggcctgtcggggacgattgttgatggtgtgggccggttggctgattggttggcgttgcgttggggtgacactgaaaagatcatggttgccgggtctggtgcggtgttgttgcagaaggctttgacggatcgtggtgttccgggccgtggcgtgattgtggctgatactggggtgtatgtggaggcgtgtcaggctttcctggagggtgtcaggtcgggtgtggtttctcatcctcgtgctgattcgaggcgtgacatgttggatattgctgtgaggtcggctgtgcagaagaagaagggttctgcgtggggttggggttcctcgtttaaggatggttctgaggttcctttggaggctgtgtctttggcgtatcttggtgcgaagatggcgaaggctaggcggcgtgaacggtctggtaggaagcgggtgtctgtggtatgaactcggatgagttggctctgattgagggcatgtacgatcgtatccgaaggttgtcttcgtggcattgtcgcattgagggctactatgagggctctaatcgggtgcgtgatttgggggttgctattccgccggagttgcagcgtgtgcagacggtggtgtcgtggcctggtattgcggtggatgctttggaggagcgtctggattggcttggctggactaatggtgacggctacggtctggatggtgtgtatgctgcgaatcggctatcaaccgcgtcgtgtgacgtccaccttgatgcactaatttttgggttgtcgtttgtggcgatcattcccggcggtgatggcacggtgtcggttcgtccgcagtcacccaagaattgtactggccggttttctgctgacgggtctcgtttggatgctggccttgtggtgcagcagacgtgtgatcctgaggttgttgaggctgagttgttgcttcctgatgtgattgttcaggtggagcggcggggttcgcgtgagtgggttgagacgggccgtatcgggaatgggttgggtgcggttccgttggtgcctgttgtgaatcgtcgccgtacttctcggattgatggtcgttcggagattacccgctcgattagggcttacacggatgaggctgtgcgcacactgttggggcagtctgtgaatcgtgacttctacgcctatccgcaaaggtgggttacgggtgtgtcggctgacgagttttcgcagcctggctgggtgctgtcgatggcttctgtgtgggctgtggataaggatgatgacggtgacaccccgaatgtggggtcgtttcctgtcaattctcctacaccgtattcggatcagatgagactgttggcgcagttgacggctggggaggctgcggttcctgaacgctattttgggtttatcacgtctaacccgccttctggggaggctttggctgctgaggagtctcggcttgtgaagcgtgccgagcgcaggcagacgtcgtttggtcagggctggctgtcggttggtttcttggctgcgagggcgttggattcgagtgttgatgaggccgcgttttttggtgatgtgggtttgcgttggcgtgatgcgtcgacgccgactcgggcggctacggctgatgctgtgacgaagcttgttggtgccggtattttgccggccgatagccgtactgtgttggagatgttggggcttgatgatgtgcaggttgaggctgtgatgcggcatcgtgccgagtcgtcggatcctttggcggcactggctggggctatttctcgtcaaactaacgaggtttgataggcgatggcttcgggtgctgtgtcgaggcttgctgctgccgggtatcagcgtgaggcggtccggtttgctgggaagtatgcgggctattatgccgagcttggtcgtttgtggcatgctgggaagatgacagatgcgcagtatgtgcgtttgtgtgtggagttggagcgtgccggccatgatggttcggcatcgttggctgccaggtttgtgtcggattttcgccggttgaatggtgtggatccgggtttgatcgtgtatgacgagtttgatgctgcggcggcgttggctaggtcgttttcgactatgaagattcttaagagtgacccggatagggcgaatgacacgattgatgctatggcggcgggtgttaatcgggctgtgatgaatgctggccgtgacacggttgagtggtcggcgggtgcgcagggtaggtcgtggcgcagggtgactgatggtgatccgtgcgcgttttgtgccatgttggctacgaggtcggattatacgaccaaagagcgggcgcttactacgggtcatacgcggcgtcataggcgtgccggtaggcgtccgtttggttcgaagtatcatgatcattgtggttgtacggtggttgaggttgttggcccttgggaaccaaatagggctgatgccgcatatcagaggacgtatgagaaggctcgtgagtgggttgatgatcatgggttgcagcagtcgcctggcaatattttgaaggctatgcgtactgttggcgacatgagatgatggtttccggttgtgtgccgccggttatcggtgcacagggttgtctcccgcacgggggtcaacaatgttgtgttgttttccgcaaggagtatagggttaggctatggccgatcaaaaagttgaagaacagagtgttgacaatgatgctgttgagcccggaaagggtggagacgttgttgatgttgtgaaggatgggcaggctgccggcgatgatcatgctggtgatgtttccgtgaaggaggagtcttcttctggcacggattggaaggctgaggctcgtaagtgggagtctcgtgctaaaagtaatttcgccgagttggagaagcttcgcgcttcggatggtgatgcggggtctgtgattgatgagcttcgccgcaagaatgaggaactcgaagacaggattaacgggtttgttcttgagggtgtgaagcgtgaggtggctgccgagtgtggcctgtcgggtgatgctgtggctttcttgcacggcggcgatcgtgaagcgctggtggagtctgctaaggctttgaagggtttgatcgaccagagtagtggtggtggcgcgggtgtgcgccgtcttgcggggagtgcccccgttgatgatgttaaacgacgtgagggtgtcgcgtttgtggatgctcttgtcaataattctaggagatgatttgtgatggctgacgattttctttctgcagggaagcttgagcttcctggttcgatgattggtgcggttcgtgaccgtgctatcgattctggtgttttggcgaagctttcgccggagcagccgactattttcggcccggtgaagggtgccgttttttctggtgttcctcgcgctaagattgttggtgagggtgaggttaagccgtctacatcggttggtgtttcggcgtttactgcgcagcctatcaaggttgtgactcagcagcgtgtgagcgacgagtttatgtgggctgatgctgattaccgtctgggtgttttgcaggatctgatttcccctgctcttggtgcttcgattggtcgcgccgtggatctgattgctttccatggtgttgatccggctacgggtaagcctgctgcggctgtcaaggtgtcgctggataagacgaagcatgttgttgatgccacggattctgctacggctgatcttgttaaggctgtcggcctgattgctggggctggtttgcaggttcctaacggtgttgctttggatccggcgttctcgtttgctctgtctactgaggtgtatccgaaggggtctccgcttgccggtcagcctatgtatcctgccgccgggtttgctggcctggataattggcgtgggctgaatgttggtgcttcttcgactgtttcgggtgccccggagatgtcgcctgcctctggtgttaaggctattgtgggtgatttctctcgtgttcattgggggttccagcgtaacttcccgatcgagctgatcgagtatggtgatccggatcagactgggcgtgatctgaagggccataatgaggttatggttcgtgccgaggctgtcctgtatgtggctatcgagtcgcttgattcgtttgctgtggtgaaggagaaggctgcaccgactcctcctccggctggtaactgatacaagataagcgaatgtgtactgtgtgcagggggtggtgttgatgggtatcattttgaagcctgaggatattgagcctttcgccgatattcctagagagaagcttgaggcgatgatcgctgatgtggaggctgtggctgtcagtgtcgccccctgtatcgctaaaccggatttcaaatacaaggatgccgctaaggctattctgcgcagggctttgctgcgctggaatgataccggggtttcgggtcaggtgcagtacgagtctgcgggtccttttgctcagactacacggtctaatactcctactaatttgttgtggccttctgagattgccgcgttgaagaagttgtgtgagggtgatggtggggctggtaaagcgttcactatcacaccgaccatgaggggtggcgtgaatcattctgaggtgtgttccacggtgtggggtgagggttgctcgtgcgggtcgaatattaatggctatgctggccctttgtgggagatatgatatgaccggttttccttatggtgaaacggttgtgatgcttcagccgactgttcgtgtcgatgatcttggtgacaaggtggaggattggtctaagcctgtcgagactgtgttccataacgtggccatctatgcttccgtttcgcaggaggatgaggctgcaggccgtgactcggattatgagcattggtcgatgcttttcaagcagcctgttgtgggtgccggttatcgttgccggtggcgtattcggggtgttgtgtgggaggctgacgggtctcctatcgtgtggcatcatccgatgtctggttgggatgctggtacgcaggttaatgtgaagcgtaagaagggctgatgggttgtggctcaggatgtgaatgtgaagctgaacttgccgggtattcgtgaggtgttgaagtcttctggggtgcagtcgatgttggctgagcgtggcgagcgggtgaggcgtgcggcctcggcgaatgtgggcggtaatgcttttgatagggcccaataccgtaatggtttgtcgtcggaggtgcaggttcaccgtgttgaggctgtggcccgtattggcaccacctataagggtgggaagcgtattgaggcgaagcatggcacgttggcgaggtcgattggggctgcgtcgtgatcgtttacggtgaccctaggaagtgggctaaacgtgtcctggcggatgatggctggctgtccgatataccgtgtactgggacggtgcctgacgatttcagcggtgatctgatttggttggcgttggatggtggcccgcagttgcatgttcgtgagcgtgtttttttgcgggtgaatgtgttttctgatatgccggatcgtgctatgtcgctagccaggcgggtggaggctgtgctggctgacggtgttgatggtgaccctgtggtgtactgtaaacggtctactggccctgatttgctggttgatggtgcacgttttgatgtgtattcgctttttgagctggtgtgtcggcctgtcgaatccgagtaagcgtatcgttgttttttagtttgattgttttgtagtttgattgttttttgggggttatgatggctggaacacgtacagcgtctaatgttcgttccgcggttactggcgacgtttatattggtaaagctcatgccggtgacactattgatggtgtgaaggaggttccttccgggcttacagctttagggtacctgtcggatgacgggtttaagattaagcctgagcgtaaaacggatgatttgaaggcttggcagaatgcggatgttgttcgcactgtggctacagagtcgtctatcgagatttctttccagctgatcgaatccaagaaagaggttatcgagctgttttggcagtcgaaggttactgccggagccgattcgggttcgttcgatatttctcctggtgccacgacgggcgtgcacgccctgttgatggatattgttgatggtgatcaggttattcgctactatttccctgaggttgagcttatcgatcgtgacgagattaagggtaagaatggcgaagtgtacgggtatggtgtgacgttgaaggcgtatcctgcccagattaataagaagggtgacgcggtgtctggtcgggggtggatgacggctttaaaagctgatactcctccgactcctcctccggccccggttcctccgaagcctcagccggatccgaatcctccggccggtaactgatacacgattttaggggattgtgatagatgagtgacacgggtttcacgttgaagattggtgaccgtagctgggtgttggcggatgcggaggaaacagcgcaggctgttcctgcccgcgtgtttcgccgtgccgccaggattgcccagtcgggggagtctgcggatttcgcccaggttgaggtgatgttttctatgttggaggctgccgccccagctgacgcggtggaggctttggaggggcttcctatggttcgtgtggcggaggtttttcgtgagtggatggaatacaagcctgacggtaagggtgcctcgctgggggaatagtttggctccacggcctgattgatgattatcgtggggccatcgaatacgattttcgcaccaagtttggtgtttctgtttatagtgttggtggcccgcagatgtgttggggtgaggctgtccggctggctggcgtgttgtgtaccgatacgtctagccagttggcggcccacctgaatggttggcagcgcccgtttgagtggtgtgagtgggctgtgttggacatgttggatcattacaggtctgctaatagtgaggggcagccggagcctgtggcgaggccgacggatgagcgtagggcccggtttacgtctgggcaggtggatgatattttggcgcgtgttcgtgctggtggcggggtgtctcgcgagattaatattatggggtgaatagtgtatgtctggtgagattgcttccgcgtatgtgtcgttgtatacgaagatgcctggccttaaaagtgatgttggtaaacagctttctggggtgatgcctgcggagggtcagcgttcgggtagcttgtttgctagcgggatgaagttggcgcttggtggtgcggctatgatgggtgccatcaatgttgctaagaagggcctcaagtctatctatgatgtgactattggtggcggtattgctcgcgctatggctattgatgaggctcaggctaaactgactggtttgggtcatacgtcttctgacacgtcttcgattatgaattcggctattgaggctgtgactggtacgtcgtatgcgttgggggatgcggcgtctacggctgcggcgttgtctgcttcgggtgtgaagtctggcgggcagatgacggatgtgttgaagactgtcgcggatgtgtcttatatttcgggtaagtcgtttcaggatactggcgctatttttacgtctgtgatggctcgcggtaagttgcagggcgatgacatgttgcagcttacgatggcgggtgttcctgtgctgtctttgcttgccaggcagactggtaaaacgtctgctgaggtgtcgcagatggtgtcgaaggggcagattgattttaacacgtttgcggctgcgatgaagcttggcatgggtggtgctgcgcaggcgtctggtaagacgtttgagggcgctatgaagaatgttaagagcgccctgggttatttgggtgctacggctatggccccgtttttgaacggcctgcggcagatttttgttgcgttgaatccggttatcaagtctatcacggagtctgtgaagcccctgtttgcgtcggtggatcaggggattcagcggatgatgccgtctattttggcgtggattaaccgtatgccggctatgatcacgagaatgaatgcacagatgcgcgccaaggtggagcagttgaagggcgtttttgcgagaatgcatttgccggtccctaaggtgaatttgggtgccatgtttgcgggtggcacagcggtgtttggtattgttgctgcgggtgtggggaagcttgttgcagggtttgccccgttggcggtttcgttgaagaatttgttgccgtcgtttggtgctttgaggggtgccgctggggggcttggtggcgtgtttcgcgccttgggtggccctgttggtattgtgatagggctgtttgctgccatgtttgctacgaacgcccagttccgtgccgctgttatgcagcttgtgggggttgttggccgggctttggggcagattatggtcgctcttcagccgctgttcgggattgttgctggcgtggttgccaggttggcgccagtgttcggccagattatcggtatggttgctggtttggctgcccggcttgtgcctgttattggtatgcttattgcccggctggttcctgttatcacccagattattggtatggtaacccaggttgctgccatgttgttgcctatgctgatgccggttattcaggctgttgttgctgtgatacggcaggttattggcgtgatcatgcagttgatacctgttttgatgccggttgtgcagcagattttgggtgctgtcatgtctgttctgccgccgattgttggtttgatacggtcgctgataccagtcatcatgtcgattatgcgtgtggtggtgcaggttgttggtgccgtgctacaggtggtggcccgtattattccggttgttatgccgatttatgctgcggtgattggattcattgccaagatttatgctgcggttatcgtttttgaggctaaggttattggcgctattcttcgtattattacgtggattgtgaatcatctggtttctggcgtgaggtctatgggcacggccatccagaatggctggaatcatatcaaatcgtttacgtcttcgtttattaacggtttcaaatctgttatttctggaggtgtgaacgctgttgtggggttttttgccaggctgggttcttctgttgctagccatgttcggtctggttttaacgcggcccgtggcgctgtttcttccgccatgaatgctattcggagtgtggtgtcttcggtggcgtccgcggttggcgggtttttcgggtcgatggcgtctagggttcgtagtggtgccgtgagggcgtttaatggtgcccggagtgcggcttcttctgctatgcatgctatggggtccgctgtgtctagtggtgtgcatggtgtgctgggttttttccggaatttgcctggcaatattcggcgtgcgcttggtaatatggggtccttgttggtgtctgctggccgtgatgtggtgtctggtttgggtaatggtatcaagaatgctttgagtggcctgttggatacggtgcgtaatatgggttctcaggttgctaatgcggcgaagtcggtgttgggtattcattccccgtcgagggtgtttcgtgaccaggttggccggcaggttgttgccggtttggctgaggggattactggtaatgctggtttggcgttggatgcgatgtcgggtgttgcttcgcagctgccggatgctgtggatgcccggtttggtgtgcgatcgtctgtgggctcgtttaccccgtatggcaggtatcagcgtatgaatgataagagtgttgtggtgaatgtgaatgggcctacttatggtgatcctaacgagtttgcgaagcggattgagcggcagcagcgtgacgctttgaacgctttggcttacgtgtgattggggggtgtggttcatgtttattcctgacccgtctgatcgtgccggtttgactgtgacctggtctatgttgccgttgattggtaatggtccggagtgtgtgcttcatttgacggattatacgggtgcgtctcctgtcatgttgttgaatgattcgttgcgcggtttgggtgttcctgaggtggagcatttttctcaaactcatgttggggtgcacggctcggagtggcgcgggtttaatgtgaagcctcgcgaggtgactttgcctgtcctggtgtcgggtgttgacccggatccggtgggcgggtttcgtgacggttttttgaaagcctatgacgagttgtggtctgcttttcccccgggcgaggtgggggagttgtcggtgaagactcctgccggtcgtgagcgtgtgttgaagtgtcggtttgattcggtggatgacacgtttacggttgatccggtgaacaggggttatgcccgctatctgttgcatttgacagcttatgacccgttttggtatggggatgagcagaagtttcgttttagtaacgcgaagttgcaggattggttgggtggtggccctgtcggcaaggatggtaccgcgtttcctgtggtgttgacgccgggtgttggttcgggctgggataacctgtctaataagggtgatgtgcctgcgtggcctgtgattcgtgttgaggggcctttggagtcgtggtctgtgcagattgatggtttgcgtgtgtcttcggattatcctgttgaggagtatgattggatcactattgatacggatcctcgtaagcagtctgcgttgttggacgggtttgaggatgtgatggatcgtttgaaggagtgggagtttgcgcctatcccgcctggcggttccaggagtgtgaatattgagatggttggtttgggtgccattgttgtgtcggtgcagtacaggtttttgagggcttggtgagcggttgtggctggtcttgttccgcatgtaacattgtttacaccggattatcgccgtgtggcgcctatcaatttttttgagtcgttgaagttgtcgttgaagtggaatggtttgtcgacgctggagttggtggtgtctggggatcattctaggcttgacgggttgactaggccgggtgcacggctggttgttgattatggtggtggccagattttttctgggcctgtgcgtaaggttcatggtgtgggtccgtggcgttcttcgcgggtgactatcacgtgtgaggatgatattcgtctgttgtggcgtatgctgatgtggcctgtgaattatcgtcccggtttggtgggttcggagtggcgtgccgacagggattatgctcactattcgggtgcggctgagtcggtggctaagcaggtgttgggggataatgcttggcgttttccgcctggcttgtttatgaacgatgatgagagtcgtggccgctacattaaggattttcaggtgcggtttcacgtgtttgccgataagttgttgccggtgttgtcgtgggctcggatgactgtcacggtgaaccagtttgagaatgcgaagtttgatcagcgtggtttggtgtttgattgtgtgcctgctgtgacccggaagcatgtgttgactgccgagtctggttcgattgtgtcgtgggagtatgtgcgtgacgccccgaaggctacgtcggtggttgttggtggccgcggcgaaggcaaggatcggctgttttgtgaggatgttgattcgatggccgaggaggattggtttgatcgtgtcgaggtgtttaaggatgcccgtaacacggattccgagaaggtgcatcttattgatgaggctgagcgggtgctgcaggagtcgggggccacgtcggggtttaagatcgagttggcggagtcggatgtgttgcggtttgggccaggcaatctgatgcctggggatttgatctatgtggatgtgggttctgggcctattgcggagattgtgcggcagattgatgtggagtgtgattcgcctggtgacgggtggacgaaggtgacaccggttgctggggattatgaggataatccgtcggcgttgttggctcgccgtgtggctggtttggctgcgggtgtgcgggatttgcaaaagttctaattgttaggggtttgttgtgggtattgtgtgtaaagggtttgatggtgtgttgaccgagtatgattgggctcaaatgtctggtctgatgggtaatatgccgtccgttcatggcccggatgattttcgtgtcagcactactgttcagggtgccacagtgttgtgtgaggttttgccggggcaggcttgggctcacggggtgatgtgcacgtcgaatagtgttgagatggtgacagagcagcttccgggcccggggaagccgagattcgactatgttgttctgtcgcgggattggcaggagaatacagccaagttggagattgttcctggcgggtcttcggagcgtgcccgtgacgtgttgcgtgccgagcctggcgtgttccatcagcagttgctggctactttggtgttgtcgtctaacgggttgcagcagcagcttgacaggcgtgctatagcggcccgtgtggcgtttggggagtctgctgcgtgtgatcctacccctgtggagggtgaccgtgtgatggttccttcgggggctgtgtgggctaaccatgccggcgagtggatgctgttgtccccccgggttgagacgggttcgaagtcgatcatgtttggcgggtctgctgtgtatgcttacacgatcccgtttgatcgccagttcactgatccgcctatcgtggtggcgtctatggctacggcggctgggggcacggcacagattgatgtgaaagcctacaatattactagcaaggattttagtttggcgtttattacgaatgatggttcgaagccgaatggtgtgcctgcggtggctaattggattgctgtcggcgtgtgactgcacgggtgttgtggcggatggtgtgatgttggggggctgtggtgtcgtggtttactcctgcactggtggcctctatttgtaccgcattggccacggttttgggttctgttcaggctgtcacatcccggtctaggaagcgtttacgcaggctgtctgcgcaggtggatgcgatggaagagtatacgtggggtgtgcggcgcgaggtgcgaaggtttaacgccgggcttcctgatgatgtggagccgatgcatcttcctgatttgcccgagtttttgaaagatactgttgatggtggtggggggtgaattgtgagggagttggaggaggagaagcggcagcgccgcaattttgagaaggcttccctgatactgttgttcctgtcgcttgtgctgttggctgtggttgccgggggtgctttacgtttcggtgctgtggcttcccaaagggattcggagcaggctagggcccagtctaatggtacagccgccaaagggctggccagccgtgtgcggcaggtgtgtgcccagggtgggcaggagtctgtgcggcttcaccagtctggtttgtgtgtggatgctgtgcgtgttgagcggagtgtgcagggtgttccgggtccggctggtgtgcgtggcccgcaaggcccgcaggggccgcaggggccggctggtgttgacggttcggcggggctggttggccctgttggtccgcagggttctcctggtttgaatggtgtgaaaggtcctgacgggttgcctggtgcgaatggatcggatggtcatgatggtgttccgggccccgccggtgctgacggtgtgaacggatccgatggtaaagatggtcgtgatggttcggctggtgagcgcggcgatgtggggccttcgggtcctgccggcccgcaaggcgcacagggtgagcgtggccccgccggtgcgaacggatccgatggtaaagatggcaaggacgggcgctcggtgatatcggtgtactgtgctgggggccgcctggctgtgaaatatagtgacggtacggcgtccacgatatcgggttctgcggcctgcgagagtgtgaaaccgtcacctgtggttaccgtatcatcccacaaatagaatatgaagagggaagggtgttactgatgttgattgtgtttggtggtggtgtgtggtgagatacattccagcggcgcatcactcggccggttcgaatagtccggtgaaccgtgttgtgattcacgcgacatgcccggatgtggggtttccgtccgcttcgcgtaaaggtcgggcggtgtctacggcaaactatttcgcttccccatcgtctggtggttctgcccattacgtgtgcgatattggggagacggtgcagtgcctgtctgagtctacgattgggtggcatgccccgccgaatccgcatagtttgggtatagagatttgcgcggatgggggttcgcacgcctcgttccgtgtgccggggcatgcttacacgagggagcagtggcttgatccgcaggtgtggcccgcggtggagcgtgccgctatcctgtgtcggcagttgtgtgacaagcatggtgttccgaaaaggaaactgtctgtggccgatttgaaggccggcaggcggggtgtttgcgggcatgtggatgttacggatgcgtggcatcagtcggatcatgacgatccggggccgtggtttccgtgggacaaatttatggctgtggtgaatggccacggcggcggttcaagtagtgaggagttgagtatggctgatgtgaaagcgttacataatcagattaaacagttgtcggcacaggtggcccagtcggtgaaccagctgcatcacgatgttggtgtggttcaggttcagaatggtgatttgggtaaacgtgtcgaggccctgtcgtgggtgaagaatccggtgacggggaagctgtggcgcagcaaggatgccctgtggagtgtctggtattacgtgctggagtgtcgtagccgtattgacaggctcgagtctgctgtcaacgatttgaaaaagtgatggtggtttgttgtgggtaaacagttttggttaggtttgctggagcgggcgttaaagacttttgttcaaacgtttgtggctgtgttgggggtgacggcgggtgtcacgtatactgcggagtcgtttcgcggtttgccgtgggaatcggccctgatcacagccggggttgctgcggtcctgtcggttgctacctcgtttggtagcccgtcgtttgtggccggcaagcccggcaagcagtcccaggtggatgcgggtttggttccaccggatgatcccggaatagtggagcctcacatggtggatgtgtcggatcctggcatgatcgagccgacggatgatgcggattttggtgtaggctatgagcctcggcgtgctgccgagtcggaggttggcacggtagagtctactgttgcataagtgaatatagatgtgtgccccagcggtgctgccacgattgtgtggtggttgccgctggggcactatttttgtgtctatagtattttatgattcgttgctgtcgatggtgtcttcgagcatctggtacaggtggaggcaggtgcagatagtttcgctggcctggtcgagaacggttcggccgataacgtttttgtggttgtcgcggtggcggatgatagcccacatgatctcgtcggctgccgcctgtaatagttttgcctggtatgcgattccggcgagccagtctagtgcttcctggcttgcatagggtgtctggtcctcgctgttgccgcgggtgttgctgttgcttgtggggtgtcctgcactgtcgcatagccacaggatttcgctgcactcgtctagcgtgtcttggtcgatagcgagatcgtcgaggctgacattgttgacggtaaggttcacgttgtcgagggagatgggtacaccgtactggttttcgacactgtcaacaatgttttgtagttgttgcatgttggtgggctgttgttggacgatgcggtgtattgctgtgttgagggtggtgtaggtgatgttgtgtgtgttgtccatggtttttatgccattccttcgttatcgtctggcatgtagtatgtgctgtttgcgtactcggtgagggtgatgagtgtttggtctgcccactgtttcactgtctgccgggtgacacccaatcgttgggcggctgtggcatatgtttggtcgtatccgtatacttcccggaatgctgccaacctagctaaatgttttcgctgtttggatggttcacaggtgagggtgtagtcgtcgatggctagctgtagatcgatcatggtggcaatgttgttgccgtgatgctggggggcggttggtgggggtggcattcctggctccacggagggtttccatgggcctccgttccagatccattgggcggcttggatgatgtcggcggtggtgtaggttcggttcactggtcaccccctgaacaggtcgttggtgttggtggtgtcgaatcgtccgacgcagtggcagtagtcgtacatgagtttgataatgtgttggtggtctcctaaataggtgtttccgctgatgctgtaggtggctgtgccgtctttgctgatggtgtatttggcggtgatggtttcgggtgtttcggtgtcggtgatgatggctgtggtggtggtgcctacggtttgtagcctggtggtttgggtgccgtcgtcgatggtggttttaaccatggtgtgtgtttttccctttcagttgctggtttggttgtcggctagatgaatgatgtcgggtaagggtttcggctggtctaaatgttgtgtggttttgttggctagccgtttggctaccctgtagcacattttggtgtagtgtttgttgtctaggttgtggtattgttcccgcaccgcaatatatagtagagagtcttggtacaggtcgtctgcactgattgcggggtagtgtgcggctgttttggtgcatgcccggttgagtgtgcgtagatgctggtttgtggcccacacccacgatgcggtggtggctaggtctgcttttgttggtcgtcggctcatggtatctcttttatcgggctatctggtagttgtttggtgttttgttgttgatagtgtagcacacgagtccggggtttccggtggtgcccgtcttgtgccggtaccagacggattctccttccatggatgggcattggatgaaggtgcgttgtccttgttcggagatttcgaggtggtgtcggtgtccggccatgaggatgtgggatatggtgccgttgtggaattcttggccgcgccaccaatcatagtgtttgccggtgcgccattggtgcccgtgggcgtgtagtatccgtgtgccggctacttcgactgtggtggtcatttcgtctcgtgcggggaagtggaagtgtaggttggggtattggttgttgagttggtaggcttctgcgatggcgcggcagcagtctacgtcgaatgagtcgtcgtaggtggtgactcctttgccgaatcgtacggcttcgccgtggttgccggggatggatgtgatggtcacgtttttgcagtggtcgaacatgtggatgagttgcatcatggccatgcgtgtcaaccggatttgttccgtcaggggtgtttgtgtgcgccaggcgttgttgcctccttgtgacacgtatccttcgatcatgtcgccgaggaatgcgatgtggactcgttgcggctggcctgcttgttgccagtagtgtttggcggctgccagtgagcgcaggtagtcgtcggcgaagtgtgctgtttctcctccggggatgcctttgccgatttggaagtctcctgccccgatgacgaaggccgcatcgctgctactggtgtgggtgtctggttttgggtgtgtccattcggctagtttatcgacgagttcgtctatagggtaggggttggttgctggttggtggtcgatgattttttgtatggatcggcctgtttctccgttgggtaaggtccattcggagatgcgtgtgcggcgtacggtgccgttggcgagattgtcgttgatggtgtcgatggcgttgtcgtggttggctagttgtgtgagtagccggtctatgttgtctatcactgggtatcctcctcttccttttgtggggtggtgttggcttgtttgcggcggtagtctttgatgacggtggcggagatggggtatccggcttcagtgagcattcgggctagctgtgtggcggggatggacttgtcggcgagcacgtctgcagccttatcaccgtagcgttggatgagggtttcagttttggttgccatgatgtcctatcggttgtgtggcgggctgccatcctgtgcggcagtcgccgtcgtgtcctggtttgcgtgtgcaccacgatgttgttccgtctgtgtggttgagtgttttaccgcacatgacgttgtggagatgctccggcagtgcggcgtcaccttggttgctggtttgtgtgtcgaagagtgttttctggttggtgaaatgctctgacacggtgccgttgtgtacgggtagtatccatgttttccattgttgttgcatccgggtgttccagtggaattgtttggccgcgttttctgcctgttttaaggttttgtagtagcctacaatgattcgctggtggttgttgtctggcttgtgtggccctcgccagtattgtgccgcaaccgcgtacctgttgttgtcggtgaagcgctcccagcagtattcgatgatgtgctgtagtacactgtcgggaatgtcttgtgcttggttttcgttaagccattcttcaacaatgatgttacgtatggcgtgtttgtctttggtggtgggtttgaacgagatactcacgatagcaccggctggtcgtcttgcatgaactggttgaaggtgttattcccggcgtgttgggcttgtgtgatttgctggtcggtccagtctgggtgttgctgtttcagatagtgccagtggcacgcattgtaggtttcgtcttgtagccgtgtgagatggttttcggtgatgatttgtttccacattgtccacgagacgtcgagccggttgaggatttcgagggcgggaatgttgaattggttgaggaacaggatttcgtgagtgtagtagtttttctcgtaggtgtcccatccgcttcggtgcctgttgggctggtttttggggtaggcttcccggcatactttgtgtaaccgtttggccatgtcgtcgggtagtttaatgtcggggttggcgcggatcatggatcgcatcccgtcgtaggtggtgccccaggtgtgcatgatgtaggtggggtcttcaccatcagcccatttttctgcacagatggcgagacggatgcgcctcctggcggcttggctggtgttgcgccggttggggatggggcacgtgtcgagggggtccatgatgttttagtgtacctttctggtttcgtgttgttgacaggttttactgtagcacagtgtctagtgcttgtgtcaaccctgtttttccggcctgcaggtaggtgtctgtgacatccccgacagtgaggggcacgcgggtggcttgggggagcgcggtttggatggtttgtgccatctggtcgcctgctttgtctgggtcggaccagatgtagatgtggtcgtagccttcgaagaatttggtccaaaaggtttgccacgaggtggctccgggtagggctacggcaggccatccgcattgttcgaggatcatggagtcgaattcgccttcgcaaatgtggatttcggctgccgggttggccatggcggccatgttgtagatggagcctgtgtccccggctggggttaggtatttggggtggttgtgggttttgcagtcgtgtgggagtgagcagcggaaacgcatttttcgtatttcggctggcccttcccagacggggtacatgtatgggatggtgatgcactggttgtagttttcgtggcctgggatggggtcattgtcgatgtatccaaggtggtggtagcgggctgtttcttcgttgatgcctcttgctgagagcaggtcgagtatgttttcgaggtgggtttcgtagcgggccgaggctttctggattcggcggcgttccgcaatgttgtaggggcgtatgctgtcgtacattcgggttttcttcttctagtcgttgttgtagcttttggagtccgcctccgatgccgcatgtgtggcagtaccagacgcccttgtcgaggttgatgctcatggagggctggtggtcgtcgtggaacgggcagaggatgtgttgctcgtttctggacggattgtagcgtatctggtgggtgtcgaggaggcggcaggtgtcagaggtgtgggaggagctcgttgagggttgataccacataggcttcgctccagggtttgttgcgctgtttcatgatgacgagtccgatagtggactggttttcgcggttgcggtgggtttcatagttgcgtgcctcccggctggcttgtttcacgaattcggcgaggtggggctgcccggctttcgcttcgatcacataggttttgtggccggtggtgaggatgaggtcgccttcgtcctcgcggccgttgaggtggaggcgttctatatcatggccgatgtgacggagctggtggagtagtcgtgtttcccattctgcgcctgcccgccggttgcgtgcctgctgtgtagccatcatagtcctttatgttcttgtgtcatgttccagggctgtttttcgaccaggggcccgaagaatgtgtattcggggtaggctcgcagccgctcatattttgttccgtctgggctggatttgccggttctctgtttcaggacggcgatgcgcgcctctgccggtatcgtgagcccgttgccgttgtcttcgccaccatacagtgagacccccaatatgagttgtggtttttcggagaggccgtttttgatttcccgcctagccggggggtgttcgatgtcggtgccggttttgtcggtggcgtggtgtgtgacaataatggtggagcctgtatccctgcctaatgctgtgatccattgcatggcttcttgctgtgcctgatagtcactttcgcagtcttggatgtccatcaggttgtcgatgacgatgatggggggaaagtggttccacatttccatgtaggcttgcagttccatggtgatgtctgtccatgtgatgggtgactggaatgagaaggtgatgtgtccgccgtggtggatgctgtctcgatagtattctggcccgtaggtgtcgatgttgtgttgtatctgtgtggtggtgtgttgggtgttgagggagatgattcgtgtggaggcctcccagggtgtcatgtcccctgatatgtagagggctggctggttgagcatggcggtgatgaacatggctagccctgatttttggctgccggaccgccccgcgatcatgacgagatcccctttgtggatgtgcatgtcctggttgcggtagagggggtctagctggggtatgcggggcagttcggctgcggtttgggaggccctctcgaaggatcgttggagagagagcatcggagccttaatctatctgttggatggtgttttggtggtcagatggagtcgatgtcgatgtcagcatcggcgggggctgtggtgtcgtctagctggccgttgtcgcgcttgtctacgtattcggcaaccttgtcgtagatggcgtcatccaatggtttgaggacgaccgcgttgaatccgtttttggtgcgtacggtggcgagtttgaaggcctgttcttcgccgagatatgcttcgaggtcgcggatcatggagtgtgggcggtcgttgttgccgcgggctttctcgatgatggcgttggggatggtttctggggtgccgttgttgagatcctggagggtgtggaagatggtgacatcggcgtagatgcggtcggcggtttgtccaccgtagccttcggtgttgtgctggacgtctcggattttgaaggcgatggcggtggcgtcctggtttcgggaggggttgaagaaggtgctgttgctgttgttgcggtagttggcgagtcccattgttgtttcctttactatttgtgttggtttttgttgtcttatattggtttatcgggtgaggctgtttcgtttgttacggaaggcctcggacacgtcactgttactggtgatggtctttttgtactgtttgagtaggtcggctagctgtgtcttgctggtggctttgttgatccggtcgatgatgatgtcgttttcctggttggcgatcttgttgacgtagtctttggcggctttatcgtatcggtcttgaagcaggattgctgcgctagcgatcaaggtggctaaatcccagtctttggatacggtttcgtctttcaatcctcccaataaatcgatgatggattgtttgatgtcttctgcggtgtctcctcggatgacggcccatggggcagcatagtcgccgccgtatttgagtgtgatagttagctttccgttgtctgtggtgtgctcgtcggtcacgtgttttccttttctttactgtcggtttggggtggctgtacggtggtttctatcgggtatctgtaggcgtttttcccgttgacggcccagcaggcgtccctgacggggcatcctttacagagtgctgtgacgtgtgggacgaagatgccttgactgattcctttcattgcttgactgtacatggatgatacatgccggtaggtgttgttgtcaaggtcatagagttcggttgctgtgccctgctcgaccgattgctcgtctcccttggtggtggcgggtgtccaaaacatgcctttcgtgacatggatgtcgtgttggttgagcatgtaccggtaggtgtgcagctgcatactgtctgcgggtaggcgtccggttttgaggtccaaaatgaaggtttcacccgtattcgtgtcggtgaatacccggtcgatgtagccgacaatctgggtgccgtcggggagggtggtttctacagggtattcgatgcctggctggccgtccaggattgcggtgatgtattctgggtggttgcgcctccatgttttccacctgtccacgaaggtggggccgtatatcatccaccaattgtagtcttttttgtgtggcccgcccgactcgcacatgtttttgcatattcggccggagggtttgatgtttgtgccttcggattcggcgagggcgatttgggtgtcgaaaatgtttgtgaaggatgagagtttgtctggcagttcagggtattcggcgggattgtacaggtggagatcgtattgttcggtgatgtggtgtatggcgcttccggcgatggtggcgtaccaggtgtggtgttgggtgtggtagccgtgtgagaggcgccatttttcaccacattcggcccactgtgacagtgatgagtaggagatgtggcctggatggtggatggttttcgggtattgtgctagaggcattactggtcgcctttgtgggtgttccatgggttgcgggtgtctaccccggcattgtgttgctggtatgcgaggagtgcgaggcagtgccaggcagcatgtgccaggtggggtagcccggattcataatcgaggttgtttccttgctgccatgatagcaggtgcctgtagagggcgtcaacgctgtggctccacggatagccgccggtccagttgttgtcgccgtatttggtggcgccgtagcctgccacggagcctagggcgtgtaaggctgcggggtcgatgagggatagcctgcaaagtttgagttctttcttggcgccagtatcagggtcggtgtacatgcgggtgggctcatccatggtgtgtgtgctccttgagtgtgggttactggttggggttgtgggcgagtgctacggcgaggatgatgatagcgagggtttctgcgatgaggatgggtgttgtgatcatttggtgtcgcggggattgttggtgagtgtggaggcgcctaggagggtggtgagggcgcatgcggcgatgatggcgagggtggctttgtgtgtggtgccggtggcgtacatccatgtgatgatggcgccttggatccatgccagtgtggtgaagaacgtttcgtagctgtgtagctcaatgttgttgttgggtgtgttcatgcttgctcctgaagaatggtgttgatggttttgtaaatgttgtacaggtcggtttcgatagataacagttggttgatttcgtggtcgagatcaatgtttgggttgagggtgttgatgcgggaggcgatgtcggtggctgtgcgtagtgtgccgccggtgtggtgaataatgtgtgccgtgtcggcgagtccggtggtgacagcgtagtgggagaggagaggcatagcggtccttgacggggttactgttgcgggttgatgttgaggtcggtgacgtgcggtgagctttctgttccggtgacgaggcagtggacggtgacggggagtttggatgctcccggctggcgaacggtggcaccgtagacgatagtaaaggtgtctttgtgggcgccaatgactttgtggagttggaggtcgatgtcggggttgccgttccatttgacaccgtgtgcagcggcctgttgttcggctttgcggttgcaggtgtgtgccgcggtgatcatggtgagacctgtggaggtttcttcgccccgtgtttgggcttgcttgtgggctttctgctgttcggctcgcagggagcggactgcggcggcctggcgggctttcttttcggctttgcgctgttgaacggtttcaggggtccattcggtgttagctgtggtggcctgtggggctggctgtgaggcgagtggcggattgtcgtcgggggctggcaggaaggatgctgcggcgatgatggcgagggtggcgccggcgatggtgtagcctgttttcttgttcatggctttgtgttcccctttccggggtgttgttcgttgctgacatggttaatactttcagcggctgggcccactgtcaaggctgcgctcagtttgtgtgagcgatacttgtgtggctaggggttttatccttgaggtgggagatgtctttcccttgtgtccagtatccatggcggttgcgagtcatccctttggcgagcatctcgtccacagtgagacacctgcgacgatctggaccctccttgactccgtgatcgcctgtgcggtgcatgtccccggcacaagtgccattaaatgtttcatggcagattgtgcagtgttctggtcggtatccgatgattgtgctatcgcacttgtggcatgtccattgcatgattggttcttctttcgtgttttaagcttgtgctctgaggattagagcgactttcagcccttgggggtatgattatataggtaaggtatttctaggcgattctagactcattgtgtgtggttgggtttatcgggcgcatagggtgagtaggtggccaacattgatgcgggttacgttccagtagagttgtgtggcttcctcactggtgagtggcttccactcatcatggctgaacactgtgccatcggtggcgatgaacgtgttggggcgtagcttgtgaagctcagtctcgacgctctgccggtaggcttcggcgaggccctcaaaatccatgtggtcgcaggagaggttttcgaggcgtgtcaggtcgaaaggctccgggcagtcgtagctggcggggctgtagagctgggtgaagtggtcggcgatcttttgcatgacgggttcctttctggtgtgtagatggtttttatcgtgtggatgcgacaaggatggcgtccacgtcgatcatgtcgatgagatcgtggagttcctcggcctcattctcggagaggtggcgccagccgggtggcccgtatagggcgccgtcgagggtgacagtccacaggggccggatgagtcgtatggcttcttcgactttggcgtggtacatgcggcgcaccatatcgagatcgatgtcgtctgaatggtttccggtgaggctgtggaggctgagcgggttgatttctgtctgcccgtagaggctggtgaaggatggtgtgatgagtgtgccatccatgagggtgctcccttctgaactgtttgggttggttgttgtggtttctagagtgtgtaggttgtgatccacagtcaaggctgcgctcattcggtgtgagcgtttcatatgggtgtggcatggaatctacacccccatactgtgtgaga

SEQ ID NO: 20 - DNA, 29385 bp, Propionibacterium acnes bacteriophage
cccttcacaccattcaaacccggggaaccctgcggaccaacaggcccaacaacacccgccgaaccattactaccatcccggccgtcaacccctgcaggcccttgcgggccgcgctcaccagcaggacccggcacaccctgcacgctacgctcaacacgctgagcatccacacacaagccagaccggtgaagacgcaccgactcctgcccgccagaagcacacacctgccgcacacgggcagccaaccctttagcggctgtaccattagactgggctttagcctgctccgaatccctttgggaagccacagaaccataccgcaaagcacccccggcgaccaccgccagtagtacaagcgacaagaacaacaatataagtgaagccttctcaaacgagcggcgctgccgcttctcttcctccaactccctcacaattcaccccccaccaccatcaacagtatccttcaaaaactcgggcaaatcaggcatctttaccggctcaacattctccggcagattcgcgttatagcggtgaacaatatggcgaatattccacgtgtattcttccatcgcatcaacctgcgcagacaactgcctcagcctcttcttcgacctgtacgtagccgcctgaatcgaaccaagaacagtagcgatagcggtacaaagagaggctacgagtgtgggtgtaagccatgacactacagccccctaccactacaacaaccacaacacgtcacatacccgcaagccgtacattacacgccgacagcaatccagttagctatcgcaggcacatcagaaggcttcgaaccatcattcgtaataaacgccaactgaaaatccttgctagtaatattgtaggctttcacatcaatctgctgcgtaccaccagccgccgtcgccatagacgccaccacaacaggcgcactaccaaacgggcggccaaacgggatcgtgtaagcatacacagcagacccgccaaactggatctgcttcgaacccgtttcgatcctgggggacagtagcatccactcgccggcatggttagcccacaccgcccccgaaggaaccatcacccggtcaccctccacaggggtaggatcacacgcagcagactccccaaacgccacacgagccgccacagcacgcctatccaactgctgctgcaacccgttagacgacaacaccaaagtagccagtagctgctgatgaaacacgccaggctcggcacgcaacacatccctggcacgctccgcacgccccccaggaacaatctccaacttggccgtattctgctcccaatcccgagacaggacaacatagtcataacgggtctcaccaggaccaggcagctggcctgtcaccgtctcaacactattcgacgtgcacatcaccccgtgagcccacgcctgccccggcaaaacctcacacaacactgtggcaccctgaaccgtcgtgcccacacgaaaatcgtccgggcccttcacggacggcatattacccatcagaccagacatttgagcccaatcatactcggtcaacacaccatcaaaacccttgcacacaatacccacaacaaacccccaattcttttctaaaatttttgcaaatcccgcacacccgcagccaaatcagccacacggcgagccaacagggccgacggattatcctcataatcccccgcaataggagtcaccttcgtccacccgtcaccaggcgatacacactccacatcaatctgccgaacaatctccgcaataggccccgagcccacatccacatagatcaaatcacccggcatcagattgcctggcccaaaccgcaacacatccgactcagccaactcgatcttaaaccccgacgtggcccctaactcggacaacacccgctccgcctcatcaatgagatgcacatgctcagaatccgtgttacgggcatccttaaacacctcgacacgatcaaaccactcatcctcggccaacgcgtcaaaatcctcacaaaacagccgatccttgccctcgccacgaccacccacaaccaccgatgtagccttaggggcgtcacgcacatactcccacgacacaatagacccagactcggcagtcaacacatgctcacgcgtcacagcaggcacacaatcaaacagtaaaccacgctgatcctgcttcacattctcaaactgtttcaccgtgacagtcatccgagcccacgacaacaccggcaacaacttatcggcaaacacgtgaaaccgcgcctgaaaatccttaatatagcggccacgactcttatcatccaccataaatatatcaggcggaaaacgccaagtattatcccgcaacgccttcttagcgaccgactccgccgcacccgaatagtgggcataatccctattggcacgccactccatcccaatgatgctggaacgataaggcacaggccacaacagcatacgccacaacaggcggatatcatcctcacacgtgatagtcacccgcgaagaacgccaaggacccacaccatgaacccgacgcacaggcccagaaaaaatctggccaccaccataatcaacaaccagccgtgcacccggcctagtcaacccgtcaagcctagaatgatcacccgacaccaccaactccaaagtggacaaaccattccacttcaacgacagtttcaacgactcaaaaaaattgataggcgccacacggcgataatccggcgtaaacaacgttacatgcggaacaagaccagccatcaaccattcaccaagccctcaaaaacctgtactgcaccgacacaacaatggcacccaaaccaaccatctcaatattcacactcttcgaaccgccaggcgggataggcgcaaactcccactctgtcaaacgatccatcacatcctcaaacccgttcaacaacgccgactgctggcgaggatccgtatcaatagtgatccaatcatactcctcgacaggataatcagaagacacacgcaaaccatcaatctgcacagaccacgactccaacgggccctcgacacgaatcacaggccacgcaggcacatcacccttattagacagattatcccaacctgaaccaacacccggtgttaacaccacaggaaacgccgtgccatccttgccgacagggccgccacccagccaatcctgcaactttgcgttactgaaacgaaacttttgctcctccccataccaaaacgggtcataggctgtcaaatgaatcacatagcgggcatagccgcgattcaccggatcaaccgtaaacgtgtcatccaccgaatcaaaccggcacttcaacacacgctcacgaccggcaggagtcttcacagacaactccccctcctcgccgggaggaaacgcagaccacaactcgtcataggctttcaaaaaaccgtcacgaaacccgcccgcaggatcctcgtcgacacccgacaccaacaccggtagcgtcacctcgcgaggcttcacattaaacccgcgccactccgagccgtgcaccccaacatgagtttgagaaaaatgctcaacctcaggaacacccaagccgcgcaacgaatcattcaacaacatgacaggagacgaccccgtataatccgtcaaatgaagcacacgctcatcgccaaaccgcggatccatagtccaatccacagtcaaaccggcacgatcagacgggtcaggaataaacatgcatacccctttactcacatgtaagccaacgcgttcaaagcgtcacgctgctgacgctcaatccgcttcgcaaactcggcaggatcaccatacgtcgggccattcacattcaccacaacactctcaccctgagcacgccgataccggtcgtacggggtaaacgagcccacagacgatcgcacaccaaaccgggcatccacggcatccggaagctgcgaagcgacacccgacatcgcatccaacgccaaaccagcattcccggtgatcccctcagccaaaccagcaacaacctgccggccaacctcgtcacgaaacacccgagacggggaatgaatacccagagcagacttcgcagcattcgcaatctgggaacccatattacgcaccgtatccaacaagccactcatagcattccggataccattacccaaaccagacaccacatcacggccagcagacaccaacaaggaccccatactacccaaggcgcccctaatattgctgggcagattccggaaaaaacctatcacactatgcacaccactagacacagccgagcccatagcgtgcatagcagaagaagccgcacccctcgcagcgttaaacccggacgaggcagcaccacgaaccctagaagccatcgacccgaaaaacgagcccaccgcggacgccaccgaagacaccacactacgaatcccgttcatcgcagccgaaacagcgccacgggccgcgttaaaccccgaccgaacatgggaagcaaccgacacaccaagccgggcaaaaaaccccacaaccgcgttcacaccgccagaaatcaccgacttgaaaccgttaataaacgcagacgtaaacgccctaatacgattccagccagcctgaaccaccgaacccatacgcgccaaaccagacacaaaatgggcaacaacccacgagatgacacgggcaacagcggcaatcacacgggcaacagccgacacgacagcaccaacaatacgggcaacaaacccgaccacggccgccaccatcggagccacaacagcaagaatacgggccaccacctgtatcacaaccgcaacaacctgaaccaccacacgcataaccgccgcaatcacaggcatcaacgaccggataagaccaataataggtggcagcacagacatgacagcacccaaaatctgctgaatcacaggcatcaaaacaggcaccaactgcatgaccacgccaacaacctgccgtatcacagcaacaacagcctgcaacaccggcatcaacgccggcaacaacattgcagcaacctgcgtcaccgcaccaataatctgcgtgatcacaggaaccagccgggcgacaagcataccaatcacaggcataagctgggcagccaaaccggcaaccataccgataatctggccgaacactggcgccaaccgtgccaccaaaccagcaattagaccaaacacaggctgcacagcggccataatctggcccaacgcctggccaaccacagccacaagctgcatcaccgcggcacggaactgggcgttcgtagcaaacattgccgcaaacagcccgatcacaataccgacagggccacccaaggcgcgaaacacgccgccaagccccccggcggcacccttcaaagcaccaaatgacggcagtagattctttaacgacaccgccagcggggcaaaccccgctacaagcttccccacacccgcggcaacaataccgaacactgcggtgccgccagcaaacatggcagcaagatttactttagggaccggcaaatgcattctcgcaaaaatgcccttcagctgctccaccttggcgcgcatctgcgcattcattcttgtgatcatagccggcatacggttaatccacgccaaaatagacggcatcatccgctgaatcccctgatccaccgacgcaaacaggggcttcacagactccgtgatagacttgataaccggattcaacgcaacaaaaatctgccgcaggccgttcaaaaacggggccatagccgtagcacccaaataacccagggcgctcttaacattcttcatagcgccctcaaacgtcttaccagacgcctgcgcagcaccacccatgccaagcttcatcgcagccgcaaacgtgttaaaatcaatctgccccttcgacaccatctgcgacacctcagcagacgttttacccgtctgcctagccaacagagacagcacaggaacacccgccatcgtaagctgcaacatgtcatcgccctgcaacttaccgcgagccatcacagacgtaaaaatagcgcccgtatcctgaaacgacttacccgaaatataagacacatcggcgatagtcttcaacacatccgtcatctgcccgccagactgcacacccgaagcagacaacgccgcagccgtagacgccgcatcacccaacgcatacgacgtaccagtcacagcctcaatagccgaattcataatcgaagacgtgtcagacgacgtatgacccaaaccagtcagtttagcctgagcctcatcaatagccatcgccctagctataccgccaccaatagtcacatcataaatcgacttgaggcccttcttagcaacattgatggcacccatcatcgccgcaccaccaagcgccaacttcatcccgccagcaaacaagctacccgaacgctgaccctcagcaggcatcacacccgacaactgtttaccaacatcacttttaaggccaggcatcttcgtatacaacgacacatatgcggaagcaatctcaccagacatacactattcaccccataatattaatctcgcgagacaccccgccaccggcacgaacacgcgccaaaatatcgtccacctgcccagacgtaaaccgggccctacgctcatccgtaggcctcgccacaggctccggctgcccctcactattagcagacctgtaatgatccagcatgtccaacacagcccactcgcaccactcaaacgggcgctgccaaccattcaggtgggccgccaactggctagacgtatcggtacacaacacgccagccagccggacagcctcaccccaacacatcaccgggccaccaacactataaacagaaacaccaaacttggtgcggaaatcgtattcgatggccccacgataatcatcaatcaggccgtggagccaaactattcccccagcgaggcacccttaccttcaggcttatattccatccactcacggaaaatctcggcaacacgaaccataggaagcccctccaaagcctccacagcatcctctggggcggcagcctccaacatggaaaacatcacctcaacctgggcgaaatcagcagactccccagactgggcaatcctggcggcacggcgaaaaacgcgggcaggaacagcctgcgctgtttcctccgcatccgccaacacccagctacggtcaccaatcttcaacgtgtaacctgtgtcactcatctatcaacaatccctcaaactatgtgtatcagttattagacggcggattcggatccggctcaggcttaggaggctccggcttcggagaaggaggaaccgggggagtatcagcttttaaagccgtcatccacccccgaccagacaccgcatcacccttcttattaatctgggcaggatacgccttcaacgtcacaccatacccgtacacttcgccattcttgcccttaatctcgtcacgatcaatcaactcaacctcagggaaatagtagcgaataacctgatcgccatcaataatatccatcaacagggcgtgcacgccagtggtggcgcctggtgaaatatcgaacgaacccgaatctgatccggcagtaaccttcgactgccaaaacagttcgataacctctttcttagactcgatcagctggaaagaaatctcgatagacgactccgtagccacagtgcgaacaacatccgcattctgccaagccttcaaatcatccgttttacgctcaggcttaatcttaaacccgtcatcagacagataccctaaagcggtaagaccgtcaggaaccgtcttcacaccatcaatagtgtcaccggcatgagctttaccaatatagacgtcacccgtaacagcagagcgaacattagacgctttacgtgttgcagccatcataacccccattaaatatcaaacaattacattaaaacaaaaacaataagcttattcagactccgcaggcctgcatatcagctcgaacagcgaatacacatcaaaacgtgcaccatcaaccagcaaatcagggccagtagaccgtttacagtacaccacagggtcaccgtccacaccatcagccagcacagcctcaacacgacgcgccaacgacatagcacgatccggcatatcagaaaacacattcacccgcaaaaaaacacgctcacgaacatgcaactgcgggccaccatcaagagccaaccaaatcagatcaccgccgaaatcgtcaggcaccgtcccagtacacggtatatcggacagccatccatcatccttgagcacacgtttagcccacacgcgaggatcaccgtaaacgatcacgacgcagccccaatcgaccgggccaacgtgccatgcttcgcctcaatacgcttcccacccctataggtggtaccaatcctcgccacagcctcaacacggtgaacctgcacctccgatgataaccctgcacgatactgggccttatcgaaagcgttaccgcccacattcgccgaggctgcacgcttgacacgctcgccacgctcagccaacatcgactgcaccccaggagacttcaacacctcacgaatacccggcaagttcagcttcacattcacatcctgagccacaatctatcagcccttcttacgcttcacattaacctgcgtaccagcatcccaaccggacatcggatgatgccacacgataggagacccgtcagcctcccacacaacaccccgaatacgccaccggcaacgataaccggcacccacaacagactgcttaaaaagcatcgaccaatgctcatagtcagagtcacgccccgcggcctcatcctcctgcgaaacggaagcatagatggccacgttatggtacacagtctcgacaggcttagaccagtcttccaccttgtcgccaagatcatcgacacgaacagtcggctgaagcatcacaaccgtttcaccgtaaggaaaactggtcatatcatatctcccacaaagggccagcgtagccgttaatatcagatccgcacgagcaaccctcaccccacaccgtggaacacacctcagaatgattcacactactcctcatggtcggtgtaatagtgaacgctttaccagccccaccatcaccctcacacaacttcttcaacgcggcaatctcggagggccatagcagatttgtgggcgtattagaccgtgtagtctgagcaaacgggcccgcagactcatactgcacctgacccgacaccccggtatcattccagcgcaacagggccctacgaaggatagccttagcggcatccttatatttgaaatccggtttagcgatacagggggcgacactgacagccacagcctccacatcggcgatcatcgcctcaagcttcccctcaggaatatcggcgaaaggctcaatatcctcaggcttcaaaatgatacccatcaacaccaccccctgcacacagtacacattcgcttatcttgtatcagttaccagacggaggattaggctcaggcttcggggccggaggaggagtcggtgcagccttctccttcacaacagcaaacgaatcaagcgactcgatagccacatacaggacagcctcggcacgaaccataacctcattatggcccttcaagtcacgcccagtctgatccgggtcaccatactcgatcagctcgatcgggaaattgcgctggaacccccaatgaacacgagagaaatcacccacaatagccttaacaccagaggcaggcgacatctccggggcacccgaaacagtcgaagaagcaccaacattcagcccacgccaattatccaaaccagcaaacccggcggcaggatacatcggctgaccggcaagcggagaccccttcggatacacctcagtagacagagcaaacgagaacgccggatccaaagcaaccccgctaggaacctgcaaaccggccccagcgataaggccgacagccttcacaagatcggtcgtagcagaatccgtagcatcaacaatatgcttcgtcttatccagcgacaccttgacagcagcggcaggcttcccagtggcaggatcaacaccatggaaagcaatcagatccacggcgcgaccaatcgaggcacccagggcaggcgaaatcagatcctgcaaaacacccagacggtaatccgcgtcagcccacataaactcgtcgctgacacgctgctgagtcacaaccttgataggctgcgcagtaaacgccgaaacaccaaccgaagcggaaggcttaacctcgccctcaccaacaatcttggcgcgaggaacaccactaaacacggcacccttcaccgggccaaaaatagtcggctgctccggcgaaagcttcgccaaaacaccagaatcgatagcacggtcacgaaccgcaccaatcatagaaccaggaagctcaagcttccccgcagaaagaaaatcgtcagccatcacaaatcatctcctagaattattgacaagagcatccacaaacgcgacaccctcacgtcgtttaacatcatcaacgggggcactccccgcaagacggcgcacacccgcgccaccactactatggtcgatcaaacccttcaaagctttcgcagactcggcaagcgactccttatcgccacccgacaagaaagcgatcgcatcactagacaaaccatactctgaagccacctcgcgcttcacaccctcaagaacaaacccgttgatcctgtcttcgagttcctcattcttgcggcgaagctcatcaatcacagaccccgcatcaccatccgaggcgcgaagcttctccaactcggcgaaattacttttagcacgagactcccacttacgggcctcagccttccaatccgtgccagaagaagactcctccttcacggaaacatcaccggcatgatcatcgccggaagcctgcccatccttcacaacatcaacaacgtctccaccctttccgggctcaacagcatcattgtcaacattctgttcttcaactttttgatcggccatagcctaaccctatactccttgcggaaaacaacacaacattgttgacccccgtgcgggagacaaccctgtgcaccgataaccggcggcacacaaccggaaaccatcatctcatgtcgcccacggtacgcatagccttcaaaatattgccaggcgactgctgcaacccgtgatcatcaacccactcacgggccttctcgtacgtcctctgatactcggcatcagccctatttggttcccaagggccaacaacctcaaccaccgtacaaccacaatgatcatgatacttcgaaccaagcggacgcttactaccacgcttatgacgccgagtatgaccagtagtaagcgcccgctctttagtcgtatagtcgcttcgcgtggcaagcatggcacaaaacgcgcacggatcaccatccgtcaccctgcgccacgaccggccctgcgcacccgcagaccactcaaccgtgtcacggccagcattcatgacagcccgattaacacccgccgccatcgcatcaatcgtatccttcgccctatccgggtcactattcatcatcttcatagtcgaaaacgacctagccaacgcggcggcagcatcaaactcgtcatacacaatcaaacccgaatccacaccattcaaccggcgaaaatccgacacaaacctggcagccaacgatgccgaaccatcatggccggcacgctccaactccacacacaaacgcacatactgcgcatctgtcatcttcccggaatgccacaaacgacccaactcggcataatagcccgcatacttcccagcaaacctgaccgcctcacgctgatacccggtagcagcaagcctcgacatagcacccgaagccatcgcctatcatacctcgttagtttgacgcgatatagccccagccagtgccgccaacggatccgcagattcggcacgatgacgcatcacagcctcaacctgcacatcatcaagccccaacatctccaacaccgtacgagaatcagcaggcaaaataccggcaccaacaagcttcgtcacagcatccgctgtagccgcccgagtcggggttgatgcatcacgccacctcaaacccacatcaccgaaaaacgcggcctcatcaacacgagaatcaagcgccctggcagccaggaaaccaaccgacagccagccctgaccaaacgacgtttgacgccgttcagcacgcttcacaagccgagattcctcggcagccaaagcctccccactaggcgggttagaagtgataaacccgaaatagcgttcaggaaccgcagcctcacccgcagtcagctgcgccaacaaacgcatctgatccgaatacggtgtaggagaattcacaggaaacgaccccacattcggggtatcaccgtcatcatccttatcaacagcccacacagaagccatcgacagaacccagccaggctgcgaaaactcatcagccgacacacccgtaacccacctttgcggataggcgtagaagtcacgattcacagactggcccaacagtgtgcgcacagcctcatccgtgtaagccctaatcgaccgagtgatctccgaacggccatcaatccgagacgtacggcgacgattcacaacaggcaccaacggaaccgcacccaacacattctcgatacggcccgtctcaacccactcacggctacctcgccgctcaacctgaacaatcacatcaggaagcaacaactccgcctcaacaacctcaggatcacacgtctgctgcaccacaaggccagcatccaaacgagacccgtcagccgaaaacttgcctgtgcaattctttggtgactgcggacgaaccaacacagacccatccccctgggggataacagccacaaacgacaacccaaaaatcagcgcatccaaatgcacatcacacgacgccgtagcaagccgattcgcagcatacacaccatccagaccgtagccgtcaccattcgtccagcccagccaatccagacgctcctccaaagcatccacagcaataccaggccacgacaccaccgtctgcacccgctgcaactccggaggaatagccacccccaaatcacgcacccggctcgagccctcatagtagccctcaatacggcaatgccacgaagacaacctttggatacgatcgtacatgccctcaatcagagccaactcatccgagttcataccacagacacccgcttcctaccagaccgttcacgccgcctagccttcgccatcttcgcaccaagatacgccaaagacacagcctccaaaggaacctcagaaccatccttaaacgaggaaccccaaccccacgcagaacccttcttcttctgcacagccgacctcacagcaatatccaacatgtcacgcctcgaatcagccctaggatgactgatcacaccagacctgacaccctccaggaacgcctgacacgcctccacatacaccccagtatcagccacaatcacgccacggcccggaacaccacgatccgtcaacgccttctgcaacaacaccgcaccagacccggcaaccatgatccgatcagtatcaccccaacgaaccgccaaccagtcagccaaccggcccacaccatcaacaatcgtccccgaaagcccatcaataacctcaacatgaaccccagcatcagtcctgccagcaccagccaacgcgacacgatccccagaacgagaaaacgaaacaccaaacaccttgccgccaaccagagccgcctcatccacagccgactgaacccacttatccgccggaatcaccgacaaagcagactggccacgatcccaccagccaagccgctcccgagcaaacccggcagcagacatcgactcatgctcatcgctcacggtcccaaaattcagacgccgccccaacgcaggattcgtgtcaccagccaacttccgccactgccgcgacacatcatccggatcagactcgtcaggaatcgaaaactccgtccacgcaaaccgcttaccacccgacaaagcctgcccacgcaaacgcaacaccacagacccgtcagccaacggcccaggcggcgtacccaaaaaaatctgctgcggatcaccagacggagccgcagacaccgtaggaagcaacgcctccaactgctcatccgacaactcctgagcctcatcacacaccaaatcatcaaccgtaaacccgcgagccgaaccccgactacgggccacaaactccaccgacccccaaccaggacagccacacttcttaccacccacacgacaatcaggatgatgcaacacaatcgactcctgaccattcgtcgcacgaacagccttcaccatacgagccaaatccggatagcggcgctcattctcaaaaaacgaccgcaaccgcataaacgccttacgagccgacttcaactcgtgagccgtatgcaaaacacgccgcccctgaaccaccatcttaaaaagctcaacaacctccaaaatagcgttcttcccattctggcgaggcacaaacaccccacacacacccgcagcaagcctgccattaccacccacagcaagccaatcatccaacacctgctgctgccacggatcaggcgtcaacccatacgcagcccccaaagcaccagcatccttgccagcagacacctgatacgccgcagccacccggtgacgaggaacctgagaacccacaacaccagacattaggcccctttacgcttccgataccgatcaatcatcgccacagcagaaccagcaccaccgctcgtggtgccagcatccccagaatgagcctccaacatgcccataaaagccttcacatgagcacgcaacgaagccaccaaatccgccctgccctcacgccacaccacatcatgcaacaccgcagcatccataagaaacaaccactcctcatcagacaccaacccggcacgcgaatcctcaccccacacacgccaccaccgacgcgtctccccacaccactcacgactatcaggaagctcaggctgcacaacactcaccaccaacacaaaaagtcgacaaacagacaaatccacaaaagggaggtatttcactaagccgtacgtggtcttgcacgcctgtgcagggggtgtccccggtgggggttggcgggtttttcaccatggaatcaatgtttttgtggtttgttgttggaattggatgtttggttcgctgcgattgcctttgcttctgttgcatgttctgcagatgatttgcccgttgtcgagggtgttgagtcctcccctgctgacgggtgtgatgtggtcggcttcggggctggttggcagatcgtgtgtgtcccaggctatctgggctccgcagagtgggcattcggtttggccttgctgtcgggcttgggtgatgagtcgttgccgccagcgccggtgggctgatgatgcggtgcggttggtgtgtgccatcgcgtcccctgatctcctatggcccccgtgagcctctcattgcctctctaagggcttggaatcgtctgggggtatgaatactctaccggtgccctgctgttcgatcctaggccttgttttgtgcgtttgagggggtgtcttgaacttgctggggtgtttgcttttctccactacccccatgggtgtgaaaaagatcacatcgccccccagcggtgtcaaaagaagaaggacacggaagaaaaatgggggtggatgggtgttcgcgtttcacagcttagcgcctagcgcctagcgctaaaggacacaggctaagcgggaacaccttaaggttttaaagtcttctacttataatatacactttaagtcttacctggtgttaagggtgtgagcgtgacacgccgtacgccttcagccgaacacgctaagcctgaaagggacacgggtgaaagagtgtggggagtgtgcgatgggagcttgcgaccagaagcacacgagacacacggcgaaaagtccatcagcgttgacggtaaaggttcctcttctcccctgatgaagaaaagaagagaagagagaaagaaccaaagagagtagagaagtaaagaagttaaccccttagctcttctaaaacttttataacttataagctttaatacttataggttataatattaaagtttaagactgatggttaactttaagtacttaaggtttttaaggtcttatagttactttaagtgtttaaagcttataagtctttaagtcttaatagttattttaagttttaaagtcttaaacactgatgttaagtttatatccttaagtgctaagcctttaaggttttatacttaacttaggtgttaagatctttatactgatgctgagccttgaagggctcagtgctaagtgtgtaagcctttaaggttattaattaactttaagtgctaagctcttaagtttacttaaagtgtttaaagctttaagactgatgccgagcccttgaggggctcggtgctaagctatcagcaccttagcgctaagcccttaggtctttaagtctttggtagactgatggatgtaagggtgaaagccgcgtcagcggatttcggccttgcgtccagctggctacctgtccagcctatcataccccacctgggatgagtcaaactggtggttttggctctataggcgggtttgaggggtgtaaacgggtgtttttggtagtaaaggtccaaaaattaaacctaaacttttccttaaattttcttagagtcttgtaacctttgagggctgttaagaccgaaacccctagccggaacgggtttcactcccggacagctgtcacactttactcttgtgtcctttccgaacacgctaggcccatcagtgctgagggtgttccctcaggctttcgagtactcgtcgctagggctcctcgtactctcaagccttcccctgatggcgtgtacttgctaaggctgtgcctgttcgggctgatgccgagcccttgagggggctcggtgctaactgctaagaccatcggtgctaagcgctaagaccttaaggcttgaaggctgatgctcccccctctttcttttaccgtgtccttcttccctcttagcatcccacactgtccacatagttgaggcttagctaaccaggataggggttgatggtctatgccgagatggctgatcgtgtatgaggctcctgggggcgtctagaatcgatcagaatatgctgggggtataaacacctagcccccaccctgtaaggcgctctaatccaccgagtcacagctttaaacggcatttctgggctacaccctccacgccagatcgaccgagtagccttaagggtgtacaccacgccaggaggatgtgatgcatctcacacacctagatgatagatcttatgtctcagctcggcaccttgactcgctagatcatctgccacacctgctatcacccagacatactcctgaaacgccctaaaagggccctagaatcgatcatcagggtcaaccctgcataatcctacccccagaagatttcaggcgctgagagaggccataaaggcttaagtgagatacgccacatcccctgccacatcccatgaaacgctcattcggattgagcgccaccttgactcccggttgcaacctacacactctagaaaccacaacaaccccccacaatcaccgaaaggagcacacacaccatggatggcacactcatcacaccatccttcaccagcctctacgggcagacagaaatcaacccactccaccccacacacctggcaggatgtgacataggcaacacccacacgtctatcatctgccgcctgtaccgtgccaaagtcgaggaagccgtccggctcatccggcccctgtggactgtcactctcgacggtgccatatacggaccccaggactggcagccactcaccgcggatgagactgaggaactccacgacatgatcgacacaatcgatgtggacgccatcattgccgaagccacacgataaaaccccaaccatacgagaaaaggaacccgtcatgcagaagatcgccaaccacttcacccagctctacacccccaccccggactgccctgagcctttcgacctgacacgcttcgaaaacctctcctgcgaccacatggattttgagggcctcgccgaagcctaccggcagagcgtggaagccgaactccacaagctacgccccaacacgttcatcgccaccgatggcaccgtgttcagccacaacgagtggaagccgctcaccggcggtgaagccacacaactctactggaatgtgagccgcatcaacgtaggccatctactcaccctgtacagccgataaaacacctagccacacaggaaacgctcacaatcgttgagcgcagccttgacacgaggtccagtcactggaagtattgatcatgtcagcaacgaacaacaccccggaaaggggacaacagtcatgaacaagaaaacaggctacaccatcgcaggaatcacagccgccatcattgccgccgcctcattcatgccagccccagacgacaatccgccactcgcctcacagccagccccacaggccaccacagccaacaccgaatggacccccaaaaccgtccaacagcgcaaagccgagaaagcggcacggcaggcagccgcagaacagtcactgcgagccgagcaggccaaagcccacaagcaagcccaagcaaggggggaagaaaccgccaccggactcaccatgatcaccgccgcacacacctgcgaccgcaaagccgaacagcaagccgccgcacacggtgtcaaatggaacggcaaccccgacatcgacctccaactccacaaaattattggtaaagacaccttctccatcgtctacggcgcaaccatgaaacagcccggcgcatccaaactacccgtcacagtccactgcctcgtcaccggaacagaaagctcaccgcacgtcaccgacctcaacatcaacccgcaacagtaacccgccaaggagcaccccccagctatgcctctcctctcccactacgctgtcaccaccggactcgccgacacggcacacatcattcaccacaccggcggcacactacgcacagccaccgatattgcctcccgcatcaacaccctcaacccagacattgatctcgaccaccaaatcaaccaactgttatctatcgaaaccaacctgtacaacatttataaaaccatcaacaccattcttcaggagcaagcatgaacacacccaacaacaacattgagctgcacagttacgaaacgttcttcaccagcctcgcctggatccaaggcgccatcatcacatggatatacgccaccggcaccccacacaaggcagccctcgccatcatcgccgcatgcgccctcaccaccctcctgggtgcctccacactcacctaccagcccaaaaacaacaaatgatcacaacacccatcatcatcgcagaaaccctcgccatcattattctcgccgtagcactcgcccacaacaacaaccagtaacccacccctaaggagcacacccccatggataagccaacccgcatgtacaccgaccccaacagcggtgccaaaaaagaattgaaactttgcaggctatccctcatcgaccctacagcccttcacgccctcggctccgtggcaggatacggtgccaccaaatacggcgacaacaactggaccggaggatacccgtggagccacagtgtcgacgccctctacaggcacctgctatcatggcagcaaggcaacaacctcgaccatgaatccgggctaccccacctggcccatgctgcctggcactgcctcgcactcctcgcctaccagcaacacgatgccggggtagacacccgcaacccatggaacacccacaaaggcgacaagtaatgcctctagcacaatacccgaaaaccatccaccatccaggccacatctcctacagttcactcacccagtgggccgaatgcggagaaaaatggcgcctccaacacggctaccacacccaacaccacacctggtacgccaccatcgccggaagcgccatacaccacatcaccgaacaatacgacctacacctgtacaaccccgacgaataccctgcactgccagacaaactcgcatccttcaaaaacattttcgacacccaagtcgccctcgccaaatccgaaggcacagaaatcaaaccctccggcagggtgtgcaaaaacatgtgcgagtcgggcgggccacacaagaaagactacaattggtggatgatatacggccccacctttgtggaccggtggaaaaactggaggcgcaaccacccagaatacatcaccgctgttattgacggccagccgggcatcgaatacccggtagaaaccaccctccaggacggcaccactattgtcggatatattgaccgtatcttcaccgacaccgacactggcgaaaccttcatcctcgacctcaaaaccggccgcctaccagcagacagcatgcagctgcacacataccggtacatgctcgcccaacacggcaacgatgtgacaaaaggcatgttttggacacccgccaccaccaagggagacgagcaatcggtcgaacagggcacatccaccgaactctacgatcttgacaacaacacctaccggcatgtatcatccatgtatagtcaagcaatgaaaggaatcagccaaggcatcttcgtaccccacgtcacagcactctgcaaaggctgccccgtcaaggacgcctgctgggctgttaacgggaaagacgcctacaggtaccctatagaaaccaccatcacagccccaacaaaagaaggcaaggagcaccagtgaccgacaacacagacgacgaccgattcaccgtcacactcaaatacggaggcgactacgccgccccatggaccgtcatccgcggagacaccgccgaccaggtaaagaagactatcatcgacctgctaggcggactcaaaaacagctccgcggcacggaactgggacctggcaacactgatcgccacagcatccatcatcctccaagatcgctacaatcaggccgccaaagactacgtagacaacatcgcctcagaaggaaacaacaccatcatcgacaaaattaacaatgccacaagcaaggcacagctagccgacctcctcaaacagtacaaaaagaccatcactagtaacagtgacgtgtctgaggctttccgcactaaacgaaacagcctcacccgataaaaaccgacacaaaccaacaaacaaaacaacacaaacagtaaaggaaacaacaatgggactcgcaaactaccgcaacaacagcaacagcaccttcttcaacccctcccgaaaccaggacgccaccgccatcgccttcaaagtccgcgacgtagaacacaacaccgaaggctacggtggacaggtcgccgatcgcatctacgccgatgtcaccatcttccacaccctagacgatctcaacaacggcaccccagaaaccatccccaacgccattatcgaaaaagcccgcggcaacaacgaccgcccacactccatgatccgcgacctagaagcctaccttggcgaagaacaggcattcaaactcgccaccgtgcgcaccaaaaacgggttcaacgcggtcgtgctcaaaccattagacgacgccatctacgataaggttgccgaatacgtagacaaacgcgacaccggccagctagacgacaccacagcctcaactgatgctgacatcgacatcgactccatctgaccaccaaaacaccatccaacagatagattaaggctccgatgctctctctccaacgatccttcgagagagcctcccaaacagccgccgaactgccccgcataccccaactagcacccttgtatgacaatctggacatgcacattcacaaaggggatttggtcatgatcgcggggcggtccggcagccaaaaatccgggctagccatgttcatcacagcgatgctcaaccagcccgccctctacatatcaggggacatgacaccctgggaggcctccacacgaatcatctcactcaacacccaacacaccaccacccagatacaacaaaacatcgacgactacgggccagaatactatcgagacagcatccaccacggccaacacatcacattctcattccagtcacccatcacatggacagacatcaccatggaactgcaagcctacatggaaatgtggaacaccttcccaccactcattgttatcgacaacctgatggacattcaagactgcgagagtgactatcaggcccagcaagaagccatgcaatggatcaccgcattaggcagggatactggctccaccattattgtcacccaccacgcaaccgacaaaaccggctcagacatcgaacaccccccagctaggcgggaaatcaaaaacggcctctccgaaaaaccacaactcatattgggagtctccctgtatggtggcgaagacaacggcaacgggctcaccatacccgccgaggcacgcatcgcagtgttgaaacagcgcacaggcaaatccagcccagacggcacccgatacgaacgactgcgagcctaccccgaatacacattcttcgggccactcgccgaaaaacagccatggaacatgaccccaacacacaaaggactatcatgtcgacacaacaatcaagaaaccgccgggccggcgcagaatgggaaacacgactcctccaccagctacgcgacaccggctatgatatagaacgcctccacctcaacggtaaagaggacgaaggcgacctcatcctcacaaccggccacaaaacctatgtgatcgaagccaaagcaggacaggcacacctcgccgaattcgtgaaacaagccagccgggaggcacgcaactacgaaacacaccgaaacaaacaaaacaattccaccatcggactcgtagtgatgaaacagcgcaacaaaccctggagcgaagcctatgtggtatcaaccctcaacgagctcctcccacacctctgacacccgccgcctcctcgacacccaccacatacggtacaacccgtccaggaacgagcaacacatcctctgcccgttccacgacgaccaccagccctccatgagcatcaacctcgacaagggcgtctggtactgccacacatgcggtatcggaggaggcctcgccaaactgaaacaacaattagagaaagaaaaccctaatgtacgacagcctacaaccctacaacattgcggaacgccgtcgaatccagaaagcctcggccctctacgaaacccacctcgaaaacatactcgacctgctctcggcaagaggcatcagcgaagaaacagcccggctccaccaccttggatacatcgacaatgaccccatcccaggccacgaagactacaaccagtgcatcaccatcccctacatgtaccccgtctggggggagccagccgaaatacgaaaaatgcgtttccgctgctcactccagcatgattgcaaaacccacaaccaccccaaatatctaaccccggccggagacacaggctccatctacaacatggccgccatggccaacccggcagccgaaatgcacatttgcgaaggcgaattcgactccatgatcctcgaacaatgcggatggccatccgtagccctacccggagccacctcgtggcaaaccttctggaccaaattttttgaaggctacgaccgcatctacatctggtccgacccagacaaagcaggcgaccagatggcacaaaccctccaaacggcactcccccaagccacccgcgtgcccctcaccctgggggatgtcacagacacctacctgcaggccggaaaaacagggttgacacaagcactagacacagtgctacaataaaaccacacaagcaaccccaacaaagaaaggcataaaaagcatcatggaccccctcgacacatgccccatccccggccgccgcgacaccagcaaagccgccaggaggcgtatccgcctcgccatctgtgcagaaaaatgggccgacggcgtggacccactacatatcatgcacacctggggcaccacctatgatgggatgcgatccatgatccgcgccaaccccgacattaggctacccgacgacatggccaaacgtttgcacaaagtatgccgggaagcctaccccaaaaaccagcccaacagacaccgaagcggatgggaccaatacgaaaaagactactacacggaggaaatactcttcctcaactccttcaacgtgccagccatcgacatgctcaaacgactcgacgtctcgtggacaatgtggaaacatatcatcaccgaaaacaatctcacccggctccagcaagaaaccgacaacgcctgccaatgggcaaacctgcgaaaacagcaccccgacaaaacggatcaggaaatcacccagatgatgtacagtaaccaagtaacgttcagcaaggtgatgaaaaccatacccgcataaacatccatgacaccagcatagtatttgcacactctttcacacacaggagacatgatggttactaaaacccaacacttgatcgacatgtacggggacaacaacggcaagtttcccgaacacctacatgacgtcatatgcggccgtgccatcatccacaatgccggcaacgtatcgtggtgcacacgcaaaccaggacacgacggcgactgctgcacaggatggcagcccaccacacaaccgatgggacatcatggcaaccaaaactgaaacccttattcaacgctacggcaacaaagccgcagacgtgctcgccgacaggtctatacccgcctcatggctagcaaaacagctcacccaggcaggataccccatctccgccaccgttattaaagactatcgccgcaaacaagccaacaccaacccgcaacaagaagaggatacccgatgatagacaatatagaccggctcctcacccagctagccaaccacgacaacgccatcgacaccatctgcgacaatctagccaatggtactgtacgccgcacacgcatctccgaatggacactccccaacggagaaaccggccgatccatacaaaaaatcatcgaccaccaacccgcaaccaacccctaccctgtagacgaactcgtcgacaagctagccgaatggacacccccaaaacccgaacaagacacccgcaccgactacagcaccgcagccttcgtcatcggagcaggagacttccaaatcggcaaaggcatcccaggcggagaaacatcacacttcgccgacaactatttgcactccctcatagtcgcaaaacactactggcaacaagccggaaaacccgagcgagtccacatcgcattcctcggcgacatgatcgaaggatacgtgtcacaaggaggcaacaacgcctggcgcacacaaacacccttgacggaacaaatcaggctcacccgcatggccatgatgcaactcgtccacatgttcgaccactgcaaaaatgtgaccatcacatccatccccggcaaccacggagaagccgtacgcttcggaaaaggagtcaccacctacgacgactccttcgacgtggactgctgccgcgccatcgcagaagcctaccagctcaacaaccaataccccaaccttcacttccacttccccagccgagacgaaatgaccaccaccgttgatgtggccggcacacaaatcctgcacgcccacggccaccaatggcgcaccggcaaacactatgattggtggcgcggccaagaattccacaacggcaccgtatctaatattctcatggccgggcaccgacaccacctagaaatctccgagcaaggcacacgcaccttcatccaatgcccatccatggaaggcgaatccacatggtaccggcacaagacgggcaccaccggaaaccccggactcgtgtgctacactatcaacaacaaaacaccaaacaactaccagatagccaggtaatagtgccatgagcagacgaccaacaaaagcagacctagccaccaccgcatcgtgggtgtgggccacagaccatcatctacgcacactcaaccgggcatgcaccaaaacagccgcacactaccccgcaatcagcgcagacgacctctaccaagactccctactatatattgcggtgcgggaacaataccacaacctagacaacaaacactacaccaaaatgtgctacagggtagccaaacggctagccaacaaaaccatacaacacctagaccagccgaaacctttacccgacatcattcatctagccgacaaccaaaccagcatctgaaaggggagaacacacaccatggttaccaccatcctcgacgacggcacccaaaccaccaggctacaaacagtaggcgccaccaccaccgccatcatcaccaacacccaaacacccgaaaccatcaccgccaaatacaccatcagcaaagacggcacagccacctacaccatcagcggaaacacctatttgggagaccaccaacacattatcaaactcatgtacgactactgccactgtgttggacgattcgacaccaccggcaccagccagctagacaacctcgacaacctattcaggggatgaccagtgagccgaaactacaccaccgccgacattattcaggcagcccaatggatctggaacggcggcccatggaaaccctccgtcgagccaggaatgccacccccaccaaccgccccccagcatcacggcaacaacattgtcaccatgatcgatctacagctagccatcgacgactacacactcacctgtgaaccatccaaacagcgaaaacatttagctaggctggcagcattccgggaagtctacggatacgaccaaacctacgccacagccgcccaacgattaggtgtcacccggcaaaccgtgaaacagtgggcagaccaaacactgatgacgttaaccgagtacgcaaacagcacatactacatgccagacgataacgaaggaatggcataacacgatgaacaacacacacaacatcacctacaccaccctcaacacagcgatacaccgcatcgtccaacaacagcccaccaacatgcaacaactacaaaacattgttgacagtgtcgaaaaccagtacggtgtacccatctccctcgacaacgtgaaccttaccgtcaacgaagtcagcctcgacgatctcgctatcgaccaggacacgctagacgagtgcagcgaaattttgtgggactgcgacagtgcaggacaccccacaaacaacagcaacacccgtgacaacagcgagaaccagagcccctatgcaagccaggaagcactagactggctcgccggaatcgcataccaggccaaactattacaggcggcagccgacgagatcatgtgggctatcatccgccaccgcgacaaccacaaaaacgttatcggccggaacgttctcgaccaggccagcgaaacgatctctacctgcctccacctgtatcagatgctcgaagacaccatcgacagcaacgaatcatagccacaccgcaatatacaaaaatagtgccccagcggtgctgccacgattgtgtggtggttgccgctggggcacacatctatattcacttatgcaacagtagactctactgtgccaacctccgactcggcagcatgtttcggcacatagcctacaccaagatccacatcatctgcaggctcgatcatgccaggatccgacacatccaccgaatgcggctcaaccaagcccctgtcatccggtggaaccaaacccgcatccacaggcgtggttttcggcttaccggccacaaacgacgggctaccaaacgaggtagccaccgacaaaaccgcagcaaccgtggccgtaatcagcgccgactcccacggcaaaccgcgaaacgactccgcagtatacgtgacacccgccgtcacccccaacacagccacaaacgtttgaacaaaagtctttaacgcccgctccagcaggcccaaccaaaactgtttacccacaacaaaccaccatcactttttcaaaccgttaacagcagactcgagcctgtcaatacggctacgacactccaaaacgtaataccagacactccacagggcatccttagtgcgccacagcttccccgtcacaggattcttcacccacgacaaagcctcgacacgcttacccaaatcaccattctgaacctgaaccacaccaacatcgtgatgcagcttattcaccgactgggccacctgtgccgacaactgtttaatctgattatgtaacgctttcacatcagccatactcaactcctcactacttgaaccgccgccgtggccattcaccacagccataaatttgtcccacggaaaccacggccccggatcgtcatgatccgactgatgccacgcatccgtcacatcagtgtgcccgcagatgccccgcctaccagccttcaaatcggatacgctaagcttccttttcggaacaccatgcttgtcacacaactgccggcacagcaccgccgccctttcaacggcaggccacacgcgaggatccagccactgctcacgagtgtaagcatgccccggtacacggaacgaggcgtgcgaacccccatccgcgcaaatctctatacccaaactatgcggattcggcggggcatgccaaccaatcgtagactccgacagacactgcaccgtctccccaatatcacacacataatgcgccgaaccacccgacgatggggaagcaaaatagttcgccgtagacaccgcacgacccttacgcgaagcggacggaaaccccacatccgggcatgttgcatgaatcacaaccctattcaccggactattcgaaccggcagagtgatgcgccgctggaatgtatctcaccacacaccaccaccaaacacgaccaacactagtaacacccttccctcttcttgttcacctatgggatgatacggtaaccacaggtgatggtttcacactctcgcaggctgcagaacccgacacggtagaggccgtaccgtcactatatttcacaaccaggcggcccccggaacagtacacagacaccacagagcgcccatcagcgccatccttaccgtctttaccgtcggatccgttcgcaccggcggggccacgctcaccacgctccccctgtgcgccttgcgggccggcaggacctgaaggacccacatcgccgcgctcaccagccgaaccatcacgaccatctttaccatcagcgccgttcacaccgtccacgcctgcacggcccgaaacaccatcacggccatccgaaccgttagcgccgggcagcccgtcaggacccttcacaccattcaaacccggggaaccctgcggaccaacaggcccaacaacacccgccgaaccattactaccatcccggccgtcaacccctgcaggcccttgcgggccgcgctcaccagcaggac

SEQ ID NO: 21 - DNA, 29882 bp, Propionibacterium acnes bacteriophage
tataaaagctttaaagtcttaaagtaaatatataaccttaacagttaaacgtttaaagcttataaaccttaacacctaagttaagtataaaaccttaaaggcttaacacttaaggatataaacttaacatcagtgtttaagacttaaaaacttaaaataactattaagacttaaagacttataagctttaaacacttaaagtaactataaaacattaaagaccttaagtacttaaagttaaccatcagtcttaaactttaatattataacctataagtcttaaagcttataggtataataatataatataagtattaaagcttataagttataaaagtttttagaagagttaaagggttaacttctttacttctcttctctctttggttctttctctcttctcttcttttcttcatcaggggagaagaggaacctttaacgtcaacgctgatggacttttcaccgtgtgtctcgtgtgcttctggtcgcaagctcccatcgcacactccccacactctttcacccgtgtccctttcaggcttagcgtgttcggctgaaggcgtacggcgtgtcacgcttaaacccttaacaccaggtaagacttaaagtgcatattataagtagaagactttaaaaccttaagggtgttcccgcttggcctgtgtcctttaacgctaggcgctaggcgctaagccttgaaacgcgaacacccatccacccccatttttcttccgtgtccttcttctttttaacacagctggggggcgatgtgatctttttcacatgccagggggtaggagaagaaaacaaccaccccggcacaaacagaacacccccctaaacaaacaaaacagggcctaggatcgaacagcagggcaccggtagagtattcatacccccaacagttcccaagcccttagaggagcaatgagaggctcgcaggggctataggtgattggggggcgtgatggcacacaccaaccgcaccgcatcctccgcccaccggcgctggcggcaacgacttatcacccaagcccgacaacaagaccaaaccgaatgcccactctgcggagccaccatcacctgggacacccatgatctcccaacaagccccgaagcggaccacatcacacccgtcagcaggggaggactcaacaccctcgacaacgggcaaatcatctgcagaacatgcaacagaagcaaaggcaatcgcagcgaaccaaacatcaagttccaacaacaaaccacaaaaacattgattccatggtgaaaaacccgccaacccccacgggaaccaccccctgcacacccgtgcaagacctcgtacggcttagtgaaatacctcccttttgtggatttgtctgtttgtcgactttttgtgttggtggtgagtgttgtgcagcctgagcttcctgatagtcgtgattggtgtggggagacgcgtcgttggtggcgtgtgtggggtgaggatccgcgtgccgggtttgtgtctgatgaggagtggctgtttctcatggatgctgcggtgattcatgattgtgtgtggcgtgaggggcgggctgaccttgtggcttcgttgcgtgctcatgtgaaggcttttatgggtatgttggatcggtattcggttgatgtggtgtctggtggccgtggtgggggttctgcggtggcgatgattgaccggtatcggaagcgtaggggggcctgattaggtgtctggtgttgttgggtctcaggttcctcgtcatcgggtggctgcggcgtattcggtgtctgctggcggtgatgctggggagttgggtcgtgcgtatgggttgacgcctgatccgtggcagcagcaggtgttggatgattggcttgctgtgggtggtaatggtaggcttgcttcgggtgtgtgtggggtgtttgtgcctcgccagaatggcaagaatgctatccttgaggttgtggagttgtttaaggcgactattcagggtcgccgtattttgcatacggctcacgagttgaagtcggctcgtaaggcgtttatgcggttgaggtcgttttttgagaatgagcggcagtttcctgacttgtatcgtatggtgaagtcgattcgggcgacgaatggtcaggaggctattgtgttgcatcatccggattgtgccacgtttgagaagaagtgtggctgtccgggttggggttcggttgagtttgtggcccgtagccggggttctgctcgcgggtttacggttgatgatttggtgtgtgatgaggctcaggagttgtcggatgagcagttggaggctttgcttcctacggtgagcgctgccccgtctggtgatccgcagcagatttttttgggcacgccgcctgggccgttggctgacgggtctgtggtgttgcgtttgcgtgggcaggctttgtcgggtggtaagaggtttgcgtggacggagttttcgattcctgacgagtcggatccggatgatgtgtcgcggcagtggcggaagttggcgggggatacgaatccggcgttggggcgtcgcctgaattttgggaccgtgagcgatgagcatgagtcgatgtctgctgcgggttttgctcgggagcgtcttggctggtgggatcgtggacagtctgctgcgtctgttgttcctgcggataagtgggctcagtctgcggtggatgaggcgagtctggttggcgggaaagtgtttggtgtctcgttttctcgttctggggatcgggttgctttggcgggtgccggcaagactgatgctggggttcatgttgaggttattgatgggctgtcgggaacgattgttgatggtgtgggccggttggctgactggttggcggttcgttggggtgatactgaccggatcatggttgccgggtctggtgcggtgttgttgcagaaggcgttgacggatcgtggtgttccgggccgtggcgtggtggttgctgatactggcgtgtatgtggaggcttgtcaggcgtttcttgagggtgtcaggtctgggaatgtttctcatcctcgtgccgattcgaggcgtgacatgttggatattgctgtgaggtcggctgtgcagaagcgtaaggggtctgcgtggggttggggctcgacgtttaaggacggcagtgaggtgccgttggaggctgtgtcgttggcgtatcttggtgcgaagatggcgaaggctaggcggcgtgaacggtctggtaggaagcgggtgtctgtggtatgaactcggatgagttggctctgattgagggcatgtacgatcgtattcaaaggttgtcttcgtggcattgtcgtattgagggctactatgagggctctaatcgggtgcgtgaccttggtgtggctattccgccggagttgcagcgtgtgcagactgtggtgtcgtggcctggtatagctgtggatgctttggaggagcgtctggattggcttggctggactaatggtgacggctacggcctggatggtgtgtatgctgcgaatcggcttgctacggcgtcgtgtgatgtgcatttggatgcgctgatttttgggttgtcgtttgttgcgatcattcctcatggtgatggtacggtgtcggttcgtccgcagtcaccaaagaattgtacgggcaagttttcggctgacgggtctcgtttggatgcgggtttggtggtgcagcagacgtgtgatcctgaggttgttgaggctgagcttttgcttcctgatgtgattgttcaggtggagcggcgtggttcgcgtgaatgggttgaggtggatcgtataccgaatgtgttgggtgcggttccgttggtgcctattgtgaatcgtcgccgtacttctaggattgatggccgttcggagattacgaggtctattagggcttacacggatgaggctgtgcgcacactgttggggcagtctgtgaatcgtgatttttatgcgtatcctcagcgttgggtgactggcgtgagcgcggatgagttttcgcagcctggctgggtcctgtcgatggcttctgtgtgggctgtggataaggatgatgacggtgacactccgaatgtggggtcgtttcctgtcaatagtcctacaccgtattcggatcagatgcgtttgttggcgcagttgactgcgggtgaggcggctgttccggaacgctatttcgggtttatcacgtctaacccacctagtggggaggctttggctgccgaggagtcgcggcttgtgaagcgtgctgaacggcgtcaaacgtcgtttggtcagggctggctgtcggttggtttcctggctgccaaggcgttggattctcgtgttgatgaggccgatttttttggtgatgttggtttgcgttggcgtgatgcttcaacgcctacccgggcggctacggctgatgctgtgacgaagcttgttggtgccggtattttgcctgctgattctcgtacggtgttggagatgttggggcttgatgatgtgcaggttgaggctgtgatgcgtcatcgtgctgagtcgtctgatccgttggcggcactggctggggctatatcgcgtcaaactaacgaggtatgataggcgatggcttcgggtgttgtgtcgaggcttgctgcgactgagtatcagcgtgaggcggtcaggtttgctgggaagtatgcgggctattatgccgagctgggtcgtttgtggcattccgggaagatgagtgacacgcagtatgttcgtttgtgtgtggagttggagcgtgtcggccatgatggttcggcatcgttggctgccaggtttgtgtcggattttcgccggttgaatggtgtggatccgggtttgattgtgtatgacgagtttgatgctgcggcggctttggctaggtcgttttcgactatgaagattcttgagagtgacccggatagggcgaatgacacgattgatgcgatggctgcgggttttgatcgggctgtcatgaatgctggccgtgacacggttgagtggtctgcgggtgcgcagggtaggtcgtggcgcagggtgactgatggtgatccgtgtgctttttgtgccatgttggctacgaggtcggattatacgaccaaagaaagggcacttactactggacatactcggcgtcataagcgtgccggtaggcgtccgtttggttcgaaatatcatgatcattgtggttgtacggtggttgaggttgttggcccttgggaaccaaatggggctgatgccgggtatcagaggacgtatgagaaggcccgtgagtgggttgatgatcacgggttgcagcagtcgcctggcaatattttgaaggctatgcgtactgttggtggcatgcgataatttgatgtggtttccggttgtgtgccgccggttatcggtgcacagggttgtctcccgcacgggggtcaacaatgttgtgttgttttccgcaaggagtgtaggttaggctatggccgatcaaaaagttgaagaacagagtgttgacaatgatgctgttgagcccggaaagggcggagacgttgttgatgttgtgaaggatgggcaggctgccggcgatgatcatgccggtgatgtttccgtgaaggaggagtcttcttctggcacggattggaaggctgaggcccgtaagtgggagtctcgtgctaaaagtaatttcgccgagttggagaagcttcgcgcctcggatggtgatgcggggtctgtgattgatgatcttcgccgcaagaatgaggaactcgaagaccggattaatgggtttgttcttgagggtgtgaagcgcgaggttgcttccgagtatggtttgtccagtgatgcgatcgctttcttatctggtggcgataaggagtcgcttgccgagtctgctaaggctttgaagggtttgatcgaccatagtagtggtggcgcgggtgtgcgccgtcttgcggggagtgcccccgttgatgatgttaaacgacgtgagggtgtcgcgtttgtggatgctcttgtcaataattctaggagatgatttgtgatggctgacgattttctttctgcagggaagcttgagcttcctggttctatgattggtgcggttcgtgaccgtgcgatcgattctggtgttttggcgaagctttcgccggagcagccgactattttcggcccggtgaagggtgccgtgtttagtggtgttcctcgcgccaagattgttggtgagggcgaggttaagccttccgcttcggttgatgtttcctcgtttactgcgcagcctatcaaggttgtgactcagcagcgtgtctcggacgagtttatgtgggctgacgccgattaccgcctgggtgtgcttcaggatctgatttcgcctgctcttggtgcttcgattggtcgcgccgtggatctgattgctttccatggtgttgatccggctacgggtaagcctgctgcggctgtcaagtcttcgctggataagacgaagaatattgttgatgcaaccgatagcgctacggctgatctgattaaggctgtcggcctgattgctggtgccggtttgcaggttcctaacggggttgctttggatccggcgttctcgtttgccctgtctactgaggtttatccgaaggggtctccgcttgccggccagcctatgtatcctgccgccgggtttgccggtttggataattggcgcggcctgaatgttggtgcttcttcgactgtttcgggtgccccggagatgtcgcctgcctctggtgttaaggctattgttggtgatttctctcgtgttcattggggtttccagcgtaacttcccgatcgagctgatcgagtatggtgatccggatcagactgggcgtgacttgaagggccataatgaggttatggttcgtgccgaggctgtgctgtatgtggctatcgagtcgcttgattcgtttgctgtggtgaaggagaaggctgccccgaagcctaatccgccggccgagaactgattcatttgttgcgataatgttcatgctgtgtgcagggggtggtgttgatgggtatcattttgaagcctgaggatattgagcctttcgccgatattcctagagataagcttgaggcgatgattgccgatgtggaggctgtggctgtcagtgtcgccccctgtatcgctaaaccggatttcaaatatagggatgcggctaaggctattcttcgtcgtgctttgctgcgctggaatgataccggggtttcgggtcaggtgcagtatgagtctgcgggcccgtttgctcagactacacggtcgaatactcctacgaatttgttgtggccttctgagattgccgcgttgaagaagttgtgtgagggtgatggtggggctggtaaagcgttcactattacaccgaccatgaggagtagtgtgaatcattctgaggtgtgttccacggtgtggggtgagggttgctcgtgcgggtcgaatattaacggctacgctggccctttgtgggagatatgatatgaccagttttccttacggtgaaacggttgtgatgcttcagccgactgttcgtgtcgatgatcttggcgacaaggtggaagactggtctaagcctgtcgagactgtgtttcataacgtggccatctatgcttccgtttcgcaggaggatgaggccgaggggcgtgactcggattatgagcattggtcgatgctgttcaagcagcctgttgtgggtgccggttatcgttgcaggtggcgtattcggggtgttgtgtgggaggctgacgggtctcctatggtgtggcatcatccgatgtctggttgggatgcgggcacgcagatcaatgtgaagcgtaagaagggctgataagttgtggctcaggatgtgaatgtgaagctgaacttgccgggtattcgtgaggtgttgaagtcttctggggtgcaggctatgttggctgagcgtggcgagcgtgtcaagcgtgcggcctcggcgaatgtgggcggtaatgcttttgatagggcccagtatcgtggcggattatcatcggaggtgcaggttcaccgtgttgaggctgtggcccgtattggcaccacctataagggtgggaagcgtattgaggcgaagcatggcacgttggcccggtcgattggggcggcgtcgtgatcgtttacggtgatccgcgtgtgtgggctaaacgcgtgctcaaggatgatggctggctgtctgatataccgtgtactgggacggtgcctgaccagtttgagggtgaccttatttggttggctcttgatggtggcccgcagttgcatgttcgtgagcgagtgtttttgcgggtgaacgtgttttctgatatgcctgatcgtgctatgtcgctagccaggcgggttgaggctgtccttgcggatggggttgatggcgacccggtggtgtactgtaaacggtctactggccctgatttgctggttgatggtgcacgttttgatgtgtattcgctttttgagctgatatgcaggcctgtcgaatccgagtaagcgtatcgttgtttttgttgattgatttttagtttgattgtttttgggggttatgatggctgcaacacgtaaagcgtctaatgttcgctctgctgttacgggtgacgtatatattggtaaagctcatgccggtgacactattgatggtgtgaagacggttcctgacggtcttaccgctttagggtatctgtcggatgacgggtttaagattaagccggagcgtaaaacggatgatttgaaggcttggcagaatgcggatgttgttcgcactgtggccacggagtcttctatcgagatttctttccagctgatcgagtctaagaaggaggttatcgaactgttttggcagtcgaaggttactgccggatccgattcgggttcgttcgatatttctcctggtgccaccactggcgtgcacgctttactgatggatattattgatggtgatcaggttattcgctactatttccctgaggttgagcttatcgatcgtgacgagatcaagggcaagaatggtgaagtgtacgggtatggtgtgacgttgaaggcgtatcctgcccagattaataagactggtaatgcggtgtctggtcgggggtggatgacggctttaaaagctgatactcctccggttcctccttctccgaagccggagcctcctaagccgcctaagcctgagccggatccgaatccgccggctggtaactgatacacatagtttgagggattgttgatagatgagtgacacaggttacacgttgaagattggtgaccgtagctgggtgttggcggatgcggaggaaacagcgcaggctgttcctgcccgcgtgtttcgccgtgccgctaagattgcccagtcgggtgagtctgcggatttcgcccaggttgaggtgatgttttctatgttggaggctgccgccccagtggatgcggtggaggccctggaggggcttcctatggttcgtgtggccgagattttccgtgagtggatggaatataagcctgacggtaagggtgcctcgctgggggaatagtttggctccacggcctgattgatgattatcgtggggccatcgaatatgattggaggacccggttcggttgctcggtttatgatgttggtggcccgataatgtgttggggtgaggctgtccggctggctggcgtgttgtgtaccgatacgtctagccagttggcggcccacctgaatggttggcagcgcccgtttgagtggtgcgagtgggctgtgttggacatgctggatcattacaggtctgctaatagtgaggggcagccggagcctgtggcgaggcctacggatgagcgtagggcccggtttacgtctgggcaggtggacgatattttggcgcgtgttcgtgccggtggcggggtgtctcgcgagattaatattatggggtgaatagtgtatgtctggtgagattgcttccgcatatgtgtcgttgtatacgaagatgccgggtttgaaggcggatgttggtaaacagctttctggggtgatgcctgctgagggtcagcgttcgggtagtctttttgctaatggcatgaagttggcgcttggtggtgccgcaatgatgggcgctatcaatgttgctaagaagggcctcaagtctatctatgatgtgactattggtggcggtattgctcgcgctatggctattgatgaggcgcaggctaaactgactggtttgggtcatacgtcgtctgacacgtcttcgattatgaattcggctattgaggctgtgactggtacgtcgtatgcgttgggtgatgcggcttctactgcggcggcgttgtctgcttcgggtgtgaagtctggcgggcagatgacggatgtgttgaagactgtcgccgatgtgtcttatatttcgggtaagtcgtttcaggatacgggcgctatttttacgtctgtgatggcccgcggtaagttgcagggcgatgacatgttgcagcttacgatggcgggtgttcctgtactgtctctgttggctaggcagactggtaaaacgtctgctgaggtgtcgcagatggtgtcgaaggggcagattgattttgccacgtttgcggctgcgatgaagcttggcatgggtggtgctgcgcaggcgtctggtaagacgtttgagggcgctatgaagaatgttaagagtgccctgggctatcttggtgctacggcgatggcgccgtttcttaacggcctgcggcagatttttgttgcgttgaatccggttatcaagtctatcacggattctgtgaagccgatgtttgctgccgtagatgctggtattcagcggatgatgccgtctattttggcgtggattaatcgtatgccgggcatgatcacgagaatgaatgcgcagatgcgcgccaaggtggagcagttgaagggcatttttgcgagactgcatttgcctgttcctaaagtgaatttgggtgccatgtttgctggcggcacggcggtgtttggtattgttgctgccggtgtgggtaagcttgttgcagggtttgccccgttggcggtgtcgttgaagaatttgttgccgtcgtttggtgctttgaagggtgccgccggcgggcttggtggcgtgtttcgcgccttgggtggccctgtcgggattgtgatcgggctgtttgctgccatgtttgccactaacgcccagttccgtgccgctgttatgcagcttgtgggggttgttggccaagccctggggcagattatggtcgctatacagcctgtgttcgggattgttgctgggctggtggcacggttggctcccgtttttggccagattattggtatggttgccgggctagcggcacagcttgtgcctttggttagtatgcttgtcgcccgtctggtgcctgtgatcacgcagattattggtgcggtgacacaggttgctgcaatgttgctgccggcgttgatgccggtgttgcaggctgttattgctgtgatacggcaggttgttggcgtggtcatacagttggtgcctgttttgatgcctgtgattcagcaaatactcggtgctatgatgtctgtgctgccacccattattggccttatccggtcgttgataccggtgatcatgtctgttatgcgtgtggtggttcaggttgttggtgccgtgctacaggtggtggcccgcattattccggttgtgatgccaattgtgacagctgtgatcgtgtttgttgcccgtattattggcgctattgtgtctgctgaagcccgcattattgggactgtcacccgtgtcatctcatgggttgtgaatcatttagtgtctggcgtgaggtctatgggcacggccatcttgaatggctggaatcatattagagcgtttacatcagcgtttattaacggtttcaagtcggtgatttctggtggtgtgaacgctgttgtggggttttttgcccggcttggttcgtcggttgccgcccatgtgaggtctggttttaacgcggccagtggtgctgtttcttccgctatgggtgcgattcggagtgttgtgtcttcggtggcgtctgctgttggcgggtttttcagttcgatggcttctcgggttcttagtggtgctgtgcgcgggtttaatggtgcccggagtgcggcctctagcgctatgcatgctatggggtccgctgtgtctagcggcgtgcatagtgtgatagggtttttccggaatttgcccggcaatattaggggcgccttgggtagtatggggtccctgttggtgtctgccggccgtgatgtggtggccggtttgggtaacggtattaagaatgctatgagtggcctgctggatacggtgcgtaatatgggttctcaggttgctaatgcggcgaagtcggtgttgggtattcattccccgtctcgggtgtttcgtgacgaggttggccgtcaggttgttgccggtttggctgagggtattactggtaatgctggtttggcgttggatgcgatgtcgggtgtggctggccggctgcctgatgcggttgatgcccggtttggtgtgcgatcgtctgtgggctcgtttacaccgtacgaccggtatcggcgtgcgagcgagaagagtgttgtggtgaatgtgaatgggcctacgtatggggatccgaacgagtttgcgaagcggattgagcggcagcagcgtgacgctttgaacgcgttggcttacatgtgattgggggtgttgttcatgtttcttcctgacccgtctgatcgtgccggtttgactgtggattggactatgtttccgttggttggtaatgatccggagcgtgtgcttcatttgacggattatacgggtgcgtctccggtcatgttgttgaatgattcgttgcgcggtttgggtgtgccggaggtggagcatttttctcaaacgcatgttggtgtgcatggttcggagtggcgcgggtttaatgtgaagcctcgcgaggtgacgctaccggttttggtgtcgggtgttgacccggatcctgatggcgggtttcgtgacggttttttgaaagcctatgacgcgttgtggtctgcgtttcctccgggcgaggtgggggagttgtcggtgaagaccccgtctggccgtgagcgtgtgctgcggtgccggtttgattcggtggatgacacgtttacggtggatccggttaatcgtggctatgcccgctatctgttgcatttgacagcttatgacccgttttggtatggggatgagcagaggtttcgttttagtaatgcgaagttgcaggattggttgggtggcggccctgtcggcaaggatggtacggcgtttcctgtggtgttgacgcctggtgttggttcgggctgggataacctgtctaataagggtgatgtgcctgtgtggcctgtgattcgtgttgagggtcctttggagtcgtggtctgtgcagattgatggtttgcgtgtgtcttctgattatccggttgaggagtatgattggattactattgatacggatcctcgccagcagtctgcgttgttggatgggtttgaggatgtgatggatcgtttgacggagtgggagtttgcgcctattcctccgggtggttcgaagagtgtgaatattgagatggttggtttgggcgctattgttgtgtcggtgcagtacaggtttttgagggcttggtgagtggttgatggctggtcttgttcctcagataacgttgtttacgccggattatcgccgtgtggcgcctatcaatttttttgagtcgttgaagttgtcgttgaagtggaatggtttgtccactttggagttggtggtgtcgggtgatcattctaggcttgacgggttgacgaagcctggggcgcggctggttgttgattatggtggtggccagattttttctgggcctgtgcgcagggtgcacggggttggcccgtggcggtcttcgcgtgtgactatcacgtgtgaggatgatattcgcctgttgtggcgtatgttgatgtggcctgtgaattatcgccccggcatggttcgtatggagtggcgtgccgacagggattatgcccactattcgggtgcggcggagtcggtggctaagcaggtgttgcgggataatgcttggcgttttccgcctggtttgtttatgaacgatgatgagagtcgtggccgctatattaaggattttcaggtgcggtttcacgtgtttgcggataagttgttgccggtgttgtcgtgggctcggatgactgtcacggtgaaccagtttgagaatgcgaagtttgatcagcgtggtttactgtttgattgtgttccggctgtgactcgtgagcatgtgttgactgccgagtctggttcgattgtgtcgtgggagtatgtgcgtgacgccccgaaggctacttcggtggtggttggtggccgcggcgagggcaaggatcggctgttttgtgaggatgttgattcgatggccgaggaggattggtttgatcgtgtagaggtgtttaaggatgctcgtaacacggattctgagcatgtgcatctcattgatgaggctgagcaggtgttgtccgagctgggggccacgtcggggtttaagatcgagttggctgagtcggatgtgttgcggtttgggccgggcaatctgatgccgggtgatttgatctatgtggatgtgggttctggccctattgcggagattgttcggcagattgatgtggagtgtgattcgccgggtgatgggtggacgaaggtgactcctgtggctggggattatgaggataatccgtcggccctgttggcgcggcgtgtggctggtttggctgcgggtgtgcgggatttgcaaaagttctagaaagaattgggggtttgttgtgggtattgtgtgtaaagggtttgatggtgtgttgaccgagtatgattgggctcaaatgtctggtctgatgggtaatatgccgtccgttcatgggccggatgattttcgtgtcggcactacggttcagggttccacagtgttgtgtgaggttctgccggggcaggcgtgggctcacggggtgatgtgcacgtcgaatagtgttgagactgtgacggggcagctgccgggccctggggagacccgatacgactatgtggtgttgtctcgggattgggagcagaatacagcgaagttggagattgttcctggggggcgtgcggagcgtgcccgtgacgtgttgcgtgccgagcctggcgtgtatcatcagcagctactggctactttggtggtgtcgtctaacgggttgcagcagcagttggataggcgtgctgtggcggctagggttgcgtttggcgagtctgctgcgtgtgatcctaccccggtggagggtgaccgggtgatggttccttcgggggctgtgtgggctaaccatgccggcgagtggatgctgttgtcccccaggattgagacgggttctaagtcgatcatgtttggcgggtctgctgtgtattcttacacgatcccgtttgatcgccagttcggtagtgcgcctgttgtggtggcgtctatggctacggcggctgggggcacgacacagattgatgtgaaagcctacaatattactagcaaggattttcagttggcgtttatcacgaatgatggttcgaagccttctggtgtgcctgctgttgctaactgggttgctgtcggcgtgtaatgtgcggctttcgtgtgcgggacgtgttgtggtggttgtagtggtagggggctgtagtgtcatggcttacacccacactcgtggcctctctttgtaccgctatcgctactgttcttggttctgttcaggctgtcacatcccggtctaggcggcgtttgcggcggctgtcggcgcaggtggatgcgatggaagagtatacgtggggtgtgcggcgtgaggtgcgaaggtttaacgccggtcttcctgatggggttgatccgcttgttttgcctgatccgcctggttttttgcaggattcgttggggggtgagtgatgagggagttggaggaggagaagcggcagcgccgcaattttgagaaagcttcactggtgttgctgtttttgtcgcttgtgctgttggtggtggttgctgcgggtgctttacgtttcggggctgtatcctctgagcgggattcggagcaggcgagggcccagtctaatggtacagccgctaaagggttggctagccgtgtgcggcaggtgtgtgcctctggtgggcaggagtcggtgcggcttcacaggtctggtttgtgtgtggatgctcagcgtgttgagcgtagcgtgcagggtgtgccgggtccggccggtgtgcgtggcccgcaagggcccgccggggttgacggccgtgacggtgttaatggttcggctgggctggttggccctgttggtccgcaggggtccccgggtttgaatggtgtgaaagggccggagggtttgcctggcgcgaatggatcggatggccgtgatggtgttccgggccgtgcaggtgctgacggtgtgaacggcgttgatggtcgggatggttcggccggtgagcgcggtgatgtgggcccttcaggtcctgccggcccgcaaggtgcccagggtgaacggggtgagcgtggccccgctggtgtgaacggatccgatggtaaagacggtaaggatggcgccgatggccgtgatgggcgttcggtgatatcggtgtactgttccgggggccgtctggttgtgaaatatagtgacggtgcggtctctaccatatcgggttcggtggcctgcgagagtgtgaaaccatcaccggtggttaccgtgtcatcccacaagtaaacaagaaaagggaagggtgttactgatgttggtcgtgtttggtggtgacatgcggtgaggtttattcctgcggcgcatcactcggccggttcgaatagtccggtgaaccgtgttgtgattcatgcaacatgcccggatgtggggtttccgtccgcttcgcgtaaggggcgggcggtgtctacggcaaactatttcgcttccccatcggcgggcggttctgcgcattatgtgtgtgatgttggggagacggtgcaatgtttgtcggagtctacgattgggtggcatgccccgccgaatccgcattctttgggtatcgagatttgcgcggatgggggttcgcatgcctcgtttcgggtgccggggcatgcttacactcgtgagcagtggcttgatccgcgggtgtggcccgctgtggagcgtgccgctatcctgtgtcggcagttgtgtgacaagtatggtgttccgaagaggaagcttagcgtatccgatttgaaggctggtaggcggggtgtttgcgggcatactgatgtgacggatgcgtggcatcagtcggatcatgatgatccggggccgtggtttccgtgggacaaatttatggctgtggtgaatggccacggcggcggttcaagtagtgaggagttaacggtggctgatgtgaaagccttgcatgatcagattaaacaattgtctgctcagcttactggttcggtgaataagctgcaccatgatgttggtgtggttcaggttcagaatggtgatttgggtaaacgtgttgatgccctgtcgtgggtgaagaatccggtgacggggaagctgtggcgcactaaggatgccctgtggagtgtctggtattacgtgctggagtgtcgtagccgtattgacaggcttgagtctgctgttaacggtttgaaaaagtgatggtggtttgttgtgggtaaacagttttggttaggtttactggagcgggcggctaagacttttgtgcaaacgtttgttgctgtgcttggggtgacggcgggtgtcacgtatactgcggagtcgtttcgcggtttgccgtgggagtctgccctgatcacagccggggttgctgcggtgctgtcggtggctacatcgtttggtagcccagcgtttgtggccggcaagcccggcaagcctcagctggatgcgggtttggttccgccggatgatgggggcttggttgagccgcacatggttgatgtgtcggatcctggcatgatcgagccgatggatgatgcggatgttgccggatatgtgccgaggcgtgcagccgagtctgaggttggcacggtagagtctactgttgcataagtgaatatagatgtgtgccccagcggtgctgccacgatcgtgtggtggttgccgctggggcactatttctgtttatgcggtgtggctatgattcgttgcggtcgatggtgtcttcgatcagctggtccaggtggaggcaggcggagatggtttcgttggcctggtctagaatgttctggccgataacgtttttgtggttgtcgcggtggcggatgatagcccacatgatatcgtcggcttccgattgtagtagttttgcctggtaggcgattccggcgagccagtctagtgcttcctggcttgcataggggctctggtcctcgctgttgtcacgggtgttgctgttgtttgtggggtgtcctgcactgtcgcatagccacaggatttcgctgcactcgtctagtgtgtcctggtcgatagcaagatcgtcgaggctgacttctttgacggtaaggttcacgttgtcgagggagatgggtatatggtactggttttcgacactgtcaacaatgttttgcagctgttgcatgttggtgggctgttgttggacgatacggtgtaccgctgttttgagggtggtgtaggggatattgtgtgtgttgttcatggtttttatgccattccttcgttatcgtctggcatgtagtatgtgctgtttgcatactcggtgagggtgatgagtgtttggtctgcccactgtttcacagtctgccgagtgacacccaatcgttgggcggcggcggcgtaggtttggtcgtatccgtatacttcacggaatgctgccagccgtgctaaatgttttcgctgttttgatggctggcaggtgagggtgtagtcgtcgatggctagctgtagatcgatcatggagacgatgttgtttccgtggtgttgtggcgcggttggtgggggtggcattcctggttcgacggagggtttccatgggcctccgttccagatccattgggcggcttggatgatgtcggctgtggtgtaggttcgggtcactggtcatcccctgaataggttgtcgaggttgtctgggttgctggtgcgggtggtgtcgaatcgtcccacacagtggcagtagtcgtacatgagtttaatgatgtgttggtggtctcccaaataggtgttgccgctgatactgtaggtggctgtgccgtctttgctgatggtgtatttggcggtgatggtttcgggtgtttcggtgttggtgatgatggcggtggtggtggcgcctacggtttgtagcctggtggtttgggttccgtcgtcgaggatggttgtgaccatggtgtgtgttctccttttcagatgctggtttggttgtcggctagatgaataatatctggtaaaggtttcggctggtcgaggtgttgtatggttttgttggctaaacgtttggctaccctgtagcacattttggtgtagtgtttgttgtctaggttgtggtattgttcccgcaccgcaatatatagtagggagtcttggtagaggtcgtctgcactgattgcggggtagtgtccggctgttttggtgcatgcccggtggagtgtgcgtagatgatggtttgtggcccacacccacgatgcggtggtggctaggtctgcttttgttggtcgtctgctcatagcatctctttcatctggctatctggtagttgtttggtgttttgttgttgatagtgtagcacacgagtccggggtggccggtggtgcccgtcttgtgccggaaccatgtggattcgccttccatggatgggcattggatgaaggtgcgttgtccttgctcggatatttcgaggtggtgtcggtgtccggccatgagaatagtggatacggtgccgttgtggaattcttggccgcgccaccattcgtagtgttggttgttgcgccattggtgtccgtgggcgtgaagtatccgtgttccggccacatcgacggtggtggtcatttcgtccctgtcagggaagtggaagtgtaggttggggtattggttggtgagttggtaggcttctgcgatggcgcggcagcagtctacgtcgaaggagtcgtcgtaggtggtgacgcctttgccgaagcgtacggcttctccgtggttgccggggatggatgtgaccgtcacgttttggcagtggtcgaacatgtggatgagttgcatcatggccatgcgggtgagccggatttgttctgtcaagggtgtttgtgtgcgccaggcgttgttgcctccttgtgacacgtatccttcgatcatgtcgccgaggaatgcgatgtggactcgttgcggtttgcctgcttgttgccagtagtgtttggcggatgtgagggagcgtaggtagtcgtcggcgaagtgtgctgtttctccttcggggatgcctttgccgatttggaagtctcccgccccgatgacgaaggctgcggtgctgtagtcggtgcgggtgtccggttcgggttttggtggctgccattcggctagtttatcgacgagttcgtctatcgggtaggggttggttgcgggttggtggtcgatgattttttgtatggatcggcctgtttctccgttggggagtgtccattcggagatgcgtgtgcggcgcacggtgccgttggctagattgtcgtcgatagtgtcgatggcgttgtcgtggttggctagctgtgtgaggagccggtctatgttgtctatcatcgggtatcctcctcgtgtgtggtgttggcttgtttgcggcggtagtctttaatgacggtggctgagatggggtatccggcttcagtgagcatttgggctagctgtgtggcggggatggttttgtcggcgagcacgtctgcagccttatcaccgtagcgttggatgagggtttcagttttggttgccatggtgtcctatcggttgtgtggtgggctgccatcctgtgcggcagtcgccgtcgtgtcctggtttgcgtgtgcaccatgagacttcgtcggcattgtggatgatggcacggccgcatatgacgtcttgtaggtgttcgggaaacttgccgttgttgtccctgtttgtgtcggtcacgtgtggggttgtggtgaccatcatgtctcctatgtgtgaaagagtgtgcaaatattatgcaggtgtcatggatgtttatgcgggtatggttttcatcaccttgctgaacgttacttggttactgtacatcatctgggtgatttcctgatctgttttgtcggggtgctgttttcgcaggtttgcccattggcaggcgttgtcggtttcctgctgtaaacgtgtcaggtgttgttcggtgatgatttgtttccacattgtccacgagacgtcgagtcgtttgagcatgtcgagggctggcacgttgaacgagtcgaggaagagtatttcctccgtgtagtattccttttcgtattggtcccatccgcttcggtgcctgttgggctggtttttggggtaggcttcccggcatactttgtgcaaacgtttggccatgtctttgggtagcctaatgtcggggttggcgcggatcatggatcgcatcccatcataggtggtgccccaggtgtgcatgatatgtagtgggtcttcaccatcagcccatttttctgcacagatggcgaggcggatacgcctcctagtggccttactcgtgtcgcggcggccggggatggggcatgtgtcgagggggtccatgatgctttttatgcctttctttgttggggttgcttgtgtggttttattgtagcactgtgttgagggcttgtgtcaaccctgttttgccggcctgcagataggtgtctgtgacatccccgacagtgaggggcacgtggatggcttgggggagtgctgcctggagggtttgggccatctggtctcccgcggggtctgggtctgaccagatgtagatgtggtcgtagccttcgaagaatttggtccaaaagttttgccacgaggtggcgccgggtagggcgacggccgaccatccgcattgttcgaggatcatggagtcgaattcgccttcgcaaatgtgcatttcggctgccgggttggccatggcggccatgttgtagatggagcctgtgtctcctgccggggttaaatatttggggtggttgtgggttttgcagtcgtgcgggagtgagcagcggaaacgcatttttcgtatttcggctgggccgccccaaacggggtacatgtatgggatggtgatgcactggttgtagtcttcgtggcctggtatggggtcattgtcgatgtatccaaggtggtggttgcgggctgtttcttcgctgacgcctcttgccgagagcaggtcgagtatgttttcgaggtgggtttcgtagagggctgaggctttctggattcggcggcgttccgcaatgttgtatgggcgtatgctgtcgtacattcgggttttctttctctagtcgttgtttcagttgggcgagtccgcctccgacaccgcatgtgtggcagtaccagacgcccttgtcgaggttgatgctcatggagggctggtggtcgtcgtggaacgggcagaggatgtgttgctcgtttcgtgacgggttgtaccgtatctggtaggtgtcgaggaggcggcaggtgtcagaggtgtgggaggagctcgttgagggttgataccacataggcttcgctccatggcttgttgcgctgtttcatcactacgagtccgatagtggactggttttcgcggtttcggtgggtttcgtagttgcgtgcctcccggctggcttgtttcacgaattcggcgaggtgtggctggcccgccttggcttctatcacataggtgttgttgccggttgtgaggatgaggtcgccttcgtcttcccttccgttgaggtgtaggcgctctatatcatagccggtgtcgcgtagctggtggaggagtcgtgtttcccattctgcgccggcccggcggttgcgtgcctgttgtgtcgacatgatagtcctttgtgtgttgtggtcatgttccatggctgtttttcggcgagtggcccgaagaatgtgtattcggggtaggctcgcagtcgttcgtatcgggtgccgtcggggctggatttgcctgtgcgctgttttagcactgcgatgcgtgcctcggcggggatggtgagcccgttgccgttgtcttcgccaccatacagggagactcccaatatgagttgtggtttttcggagaggccgtttttgatttcccgcctagccggggggtgttctatgtcggagccggttttgtcggttgcgtggtgggtgacaataatggtggagcccgtgtccctgcctaatgctgtgatccattgcatggcttcttgctgggcctggtagtcactctcgcagtcttgaatgtccatcaggttgtcgataacgatgatgggtgggaaggtgttccacatttccatgtaggcttgcagttccatggtgatgtctgtccatgtgatgggtgactggaatgagaatgtgatgtgttggccgtggtggatgctgtctcgatagtattctggcccgtagtcgtcgatgttttgttgtatctgggcggtggtgtgttgggtgttgagtgagatgattcgtgtggaggcctcccagggtgtcatgtcccccgatatgtagagggcgggctggttgagcatcgctgtgatgaacatggctagcccggatttttggctgccggaccgccccgcgatcatgacgagatcccctttgtgaatgtgcatgtccaggttgtcatacaagggtgctagttgtggtatgcggggcagttcggctgcggtttgggaggctctctcgaaggatcgttgtagagagagcatcggagccttaatctatctgtctatcggttggatgatgttttggtggtcagatggagtcgatgtcgatgtcagcatcagcaggggctgtggtgtcgtctagctggccgttatcgcgtttgtctacgtattcggcaaccttatcgtagatggcgtcgtctaatggtttgaggacgaccgcgttgaacccgtttttggtgcgtacggtggcgagtttgaaggcctgttcttcgccaaggtaggcttctaggtcgcggatcatggagtgtggacggtcgttgttgcctcgcactttttcgatgatggcgttggggatggtttctggggtgccgttgttgaggtcgtctagggtgtggaagattgtgacatcagcgtagatgcggtcggcggtctgtccgccgtagccttcggtgttgtgctggacgtcgtggattttgaaggcgatggcggtggcgtcctggtttcgggacgggttgaagaaggtgctgttgctgttgttgcggtagtttgcgagtcccattgttgtttcctttactatttgtgttgatttgtttgttggtttttatcgggtgaggctgtttcgtttgttgcggaacgcctctgacacgtcactgttactggtgatgatctttttgtactgtttgaggaggtctgctagctgtgtcttgctggtggctttgttgatccgatcgatgatgatgtcgttttcctggttggcgatcttgttgacgtagtctttggcggctttatcgtatcggtcttgaagcaggattgctgcgctagcgatgagggttgcgaggtcccagtctttggatacggtttcgtctttcaatcctcctagcagatcaataatggattgtttgatgtcttctgcggtgtctcctcggatgactgtccatggggcggcgtagtctccaccgtatttgagtgtgatagttagctttccgttgtctgtggtgtgctcgtcggtcacgtgttttccttttctttactgtcggtttggggtggctgtacggtggtttctatagggtacctgtaggcgtctttcccgttaacagcccagcaggcgtccttgacggggcagcctttgcagagtgctgtgacgtggggtacgaagatgccttggctgattcctttcattgcttgactgtacatggatgatacatgccggtaggtgttgttgtcaaggtcgtacagttcggtggatgtgccttgtgtcggggacttgtcgtcgttgcggctggtggcgggtgtccaaaacatgcctttcgtcacatggatgccgtgttggttgagcatgtaccggtatgtgtgcagctgcatgctgtcggcgggtagacggccggttttgaggtccaaaatgaaggtttcgccggtgttggtgtcggtgaatacccggtcaatatatccgactatttttgtgccgtcttggagggtggtttctaccgggtattcgatgcctggctggccgtcaataacagcggtgatgtattctgggtggttgcgcctccatgttttccagcggtccacaaaggtggggccgtatatcatccaccaattgtagtcttttttgtgtggcccgcctgactcgcacatgtttttgcatattctgccggagggtttgatttcggtgccttcggattcggcgagggcgacttgggtgtcgaaaatgtttgtgaaggatgcgagtttgtctggcagtgcagggtattcgtcggggttgtacaggtgtaggtcgtattgttcggtgatgtggtgtatggcgcttccggcgatggtggcataccaggtgtggtgttgggtgtggtagccgtgttggaggcgccatttttctccgcattcggcccactgggtgagtgaactgtaggagatgtggcctggatggtcgatggtggacgggtattgtgctagaggcattactggtcgcctttgtgggtgttccatgggtttcgggtgtcttggccggcatcgtgttgctggtatgcgaggagtgcgaggcagtgccaggctgcgtgtgccagatgcggcaaatgtgattcgtggtcgaggttgttgccttgctgccatgatagtaggtgccggtagagggcgtcgacactgtggctccacgggtatccgccggtccagttgttgtcgccgtatttggtggcgccgtatccggccacggagcctagggcgtgaagggctgtggggtcgatgagggatagcctgcaaagtttcaattcttttttggcgccagtatcggggtcggtgtacatgctggttggttcatccatggtgtgtgtgctccttacgtgtggggttactggttggggttgtgggcgagtgtgacggcgagaataatgatggcgagggtttctgcgatgatgatgggtgttgtgatcatttgtggtctcggggattgttggtgagtgttgaggcgcctaggagggtggcgagggagcatgcggcgatgatggcgagggctgccttgtggccggtgccggtggcgtacatccatgtgatgatggcgccttggatccatgccagtgtggtgaagaacgtttcgtagctgtgtagctcaatgttgttgttgggtgtgttcatgcttgctcctgaagaatggtgttgatggttgtgtaaatgttgtacaggtcggtttcgatagataacagttggttgatttggtggtcgagatcaatgtttgggttgagggtgttgatgcgggaggcaatatcggtggctgtgcgtagtgtgccgccggtgtggtgaatgatgtgtgccgtgtcggcgagtccggtggtgacagtgtagtgggagaggagaggcatgatgtgagttctccttgacggggttactgttgcgggttgatgttgaggtcggtgacgtgcgggtggtcttctgttccggtgacgaggcagtggacggtgactgggagtttggatgctcccggctgtttcatggttgcgccgtagacgatggagaaggtgtctttgccaataattttgtggagttggaggtcgatgtcggggttgccgttccagttgacaccgtgtgcggcggcctgttgttcggctttgcggttgcaggtgtgtgccgcggtgatcatggtgagaccctgtgaggtttcttcgccccgtgtttgggcttgccggtgggctttctgctgttcggcttgtagggagcggactgcggctgcctggcgggctttcttgtcggctttgcgctgttggacggtttcaggtgtccattcggtgttggctgtggtggcttgtggggctggctgtgaggcgagtggcgggttgtcgtcgggtgccgggaggaaggatgctgcggcgatgatggcgagagtggcgccggcgatggtgtagccttttttcttgttcatgactgttgtcccctttccgggggtgttgttcgttgctgacatgatcaatatttccagcggctgggcccactgtcaaggctgcgctcaacgattgtgagcgatccttgtgtggctaggggtgatggcttctttcgcccaataggatgtgccaccgctggtccagtatccgagtttgttgcgctgcatgcccttagcctccatctcgtccacggtgaggcacctgcggcgattagggccttccttgacccagtggtcgcctgtccggtgcatgtcgccagagcaagtactagtgaatgtctcgtggcagattgtgcagtgttctggtcggtatccgatgattgtggtgtcacacttgtggcatgtccattgcatgattggtccttctttcgtgttttaagctgtgactcggtggattagagcgactttcagcccttgggggtatgattatataggtcaggtatttctaggcgattctaggctcattgtgtgtggttgggttttatcgggcgaacagggtgagcaggcttccgatattgatgcgggtcacgttccagtagagttgcgtggcctccgtctgtgtgagtggcttccactcgttgtggctgaacacggtgccatcggatgcgatgaacgtgttggggcgtagtttgtggagttcagtctctacatgctgccggtaggtttcggcgaggcccccgaaatcgaggtggtcgcaggagaggttttcgaggcgtgtcaggtcgaaaggctcagggcagtcgtcgctggtgggggtgtagagctgggtgaagtggttggcgatcttctgcatgacgggttccttttctagtgtggtgggttgatagttttatcgggtggatgcgaccaggatggcgtctacgtcgatcatgtcgatcatgtcgtggagttcctcggcctcattctcggagaggggacgccagccgggtggcccgtatagggcgccgtcgagggtgacagtccacaggggccggatgagtcgtatggcttcttcgactttggcgtggtacatgcggcgcaccatatccagatcgatgtcgtctgaatggtttccggtggggctgtggaggctgagggggtcgatttctgtctgcctgtagaggctggtgaaggatggggtgatgagtgtgccatccatgggtgatgttcctttctggattgtcttggttggttgttgtggtttttatggtgtgagggttgtgatccatagtcaaggctgcgctcaatcggattgagcgtttcatgaagggtgtgtcgggtgtgacagatgtcactgaagcccttgatggcctctcccagcgcctcaaatcttctaggggtaggattatgcagggttggccctgctagtcgattctagggcccttctagggcgtctcaggggcatgtctgggtgatagcaggtccggtagatgacccggcagatctaccttggctttcatgacgggggtcaaggtgccagatctgggcatggaatctacaccctcatactgtgtgagataggccacatcctcctggcttagtgtgcaccctcaagactaccctgccgatctgacatggagggtgcagcacagaaatgccgtttaaagccttcacacggagcctaggagcgccttacagggtgggggctaggtatttatacccccaagcaattctgatcgattctagacgcccacaggagcctgatacgcgatcagccatctcagcatagaccatccgcccctatcctggttagctaagcctcaactatgtggacagtgctggatgctaagggggaagaaggacacggtaaaagaaagagagggggagcatcagccttcaagccttaaggtcttagcgctgagcaccgatggtcttagcagttagcaccgagccccctcaagggctcggcatcagcccgaacaggcacagctcatcaggcacagccctgaaaagggtacacgccatcagggaaggcttgagagtacgaggagccctagcgacgagtactcgaaagcctgagggaacaccctcagcactgatgggcctagcgtgttcggaaaggacacaagagtgaagtgtgacagctgtccgggagtgaaacccgttccggctaggggtttcagccttaaccaccctcaaaggttacaagactctaagaaaatttaaggaaaagtttaggtttaatttttggacctttactaccaaaaacacccgtttacacccctcaaacccgcctatagagccaaaaccaccagtttgactcatcccaggtggggtatgataggctggacaggtagccagctggacgcaaggccggaaagtgctgacgcacttcccaacctcgcttaccatcagtctaccaaacactttaaagcttcaaggcttagcgctaagcccttaagaccttaacgcttagcaccgagccccctcaagggctcggcatcagccttaaagtcttaaacactttaagtaactttaaaaccttaaaggcttaacacttagggatctaagttactataaaagctttaaagtcttaaagtaaatatataaccttaacagttaaacgtttaaagcttataaaccttaacacctaagttaagtataaaaccttaaaggcttaacacttaaggatataaacttaa

SEQ ID NO: 22 - DNA, 20 bp, Artificial Sequence
  Description of Artificial Sequence: Synthetic primer
agagtttgatcmtggctcag

SEQ ID NO: 23 - DNA, 20 bp, Artificial Sequence
  Description of Artificial Sequence: Synthetic primer
cggttaccttgttacgactt

SEQ ID NO: 24 - DNA, 20 bp, Artificial Sequence
  Description of Artificial Sequence: Synthetic primer
agcgttgtccggatttattg

SEQ ID NO: 25 - DNA, 1537 bp, Cutibacterium acnes
tttttcattggagagtttgatcctggctcaggacgaacgctggcggcgtgcttaacacatgcaagtcgaacggaaaggccctgcttttgtggggtgctcgagtggcgaacgggtgagtaacacgtgagtaacctgcccttgactttgggataacttcaggaaactggggctaataccggataggagctcctgctgcatggtgggggttggaaagtttcggcggttggggatggactcgcggcttatcagcttgttggtggggtagtggcttaccaaggctttgacgggtagccggcctgagagggtgaccggccacattgggactgagatacggcccagactcctacgggaggcagcagtggggaatattgcacaatgggcggaagcctgatgcagcaacgccgcgtgcgggatgacggccttcgggttgtaaaccgctttcgcctgtgacgaagcgtgagtgacggtaatgggtaaagaagcaccggctaactacgtgccagcagccgcggtgatacgtagggtgcgagcgttgtccggatttattgggcgtaaagggctcgtaggtggttgatcgcgtcggaagtgtaatcttggggcttaaccctgagcgtgctttcgatacgggttgacttgaggaaggtaggggagaatggaattcctggtggagcggtggaatgcgcagatatcaggaggaacaccagtggcgaaggcggttctctgggcctttcctgacgctgaggagcgaaagcgtggggagcgaacaggcttagataccctggtagtccacgctgtaaacggtgggtactaggtgtggggtccattccacgggttccgtgccgtagctaacgctttaagtaccccgcctggggagtacggccgcaaggctaaaactcaaaggaattgacggggccccgcacaagcggcggagcatgcggattaattcgatgcaacgcgtagaaccttacctgggtttgacatggatcgggagtgctcagagatgggtgtgcctcttttggggtcggttcacaggtggtgcatggctgtcgtcagctcgtgtcgtgagatgttgggttaagtcccgcaacgagcgcaacccttgttcactgttgccagcacgttatggtggggactcagtggagaccgccggggtcaactcggaggaaggtggggatgacgtcaagtcatcatgccccttatgtccagggcttcacgcatgctacaatggctggtacagagagtggcgagcctgtgagggtgagcgaatctcggaaagccggtctcagttcggattggggtctgcaactcgacctcatgaagtcggagtcgctagtaatcgcagatcagcaacgctgcggtgaatacgttcccggggcttgtacacaccgcccgtcaagtcatgaaagttggtaacacccgaagccggtggcctaaccgttgtgggggagccgtcgaaggtgggactggtgattaggactaagtcgtaacaaggtagccgtaccggaaggtgcggctggatcacctcctttctaaggag

1. A composition comprising:
a first bacteriophage that infects and lyses at least one Propionibacterium acnes (P. acnes) strain selected from B9, PA4, PA3, and PA5;
a second bacteriophage that infects and lyses at least one P. acnes strain selected from B9, PA4, PA3, and PA5 that is not infected and lysed by the first bacteriophage; and
a pharmaceutically or cosmetically acceptable adjuvant, carrier or vehicle.

2. The composition of claim 1, wherein:
the first selected phage infects and lyses P. acnes strain B9; and
the second selected phage infects and lyses P. acnes strain PA4,
wherein the two selected phages have different lytic specificities from one another with respect to P. acnes strains B9 and PA4.

3. The composition of claim 1, wherein:
the first selected phage infects and lyses P. acnes strain PA3; and
the second selected phage infects and lyses P. acnes strain B9,
wherein the two selected phages have different lytic specificities from one another with respect to P. acnes strains PA3 and B9.

4. The composition of claim 1, wherein:
the first selected phage infects and lyses P. acnes strain PA3; and
the second selected phage infects and lyses P. acnes strain PA4,
wherein the two selected phages have different lytic specificities from one another with respect to P. acnes strains PA3 and PA4.

5. The composition of claim 1, wherein:
the first selected phage infects and lyses P. acnes strain PA4; and
the second selected phage infects and lyses P. acnes strain PA5,
wherein the two selected phages have different lytic specificities from one another with respect to P. acnes strains PA4 and PA5.

6. The composition of claim 1, further comprising at least one phage that infects and lyses at least one P. acnes strain selected from PA1, PA2, PA6, PA7, PA8, PA9, PA10, PA11, and PAP.

7. (canceled)

8. The composition of claim 1, comprising:
a. a first bacteriophage that infects and lyses at least one P. acnes strain selected from B9, PA4, PA3, and PA5;
b. a second bacteriophage that infects and lyses at least one P. acnes strain selected from B9, PA4, PA3, and PA5; and
c. a third bacteriophage that infects and lyses at least one P. acnes strain selected from B9, PA4, PA3, and PA5;
wherein at least one P. acnes strain infected by the second bacteriophage is not infected and lysed by at least one of the first bacteriophage and the third bacteriophage, and
wherein at least one P. acnes strain infected by the third bacteriophage is not infected and lysed by at least one of the first bacteriophage and the second bacteriophage.

9. The composition of claim 8, wherein:
the first bacteriophage infects and lyses P. acnes strain PA3;
the second bacteriophage infects and lyses P. acnes strain PA4; and
the third bacteriophage infects and lyses P. acnes strain B9,
wherein each of the three bacteriophages have different lytic specificities from one another with respect to P. acnes strains PA3, PA4 and B9.

10. The composition of claim 1, comprising at least three bacteriophages selected from PS7-1, PA1-11, PAP-12, PA1-9 and PA1-13.

11. The composition of claim 1, wherein the composition is formulated for delivery to mammalian skin or mammalian eyes.

12. The composition of claim 11, wherein the composition is formulated for topical application.

13. The composition of claim 12, wherein the composition is in the form of a gel, cream, ointment, lotion, paste, solution, microemulsion, liquid wash, spray, application stick, cosmetic, dressing, face-wash, soap, powder, spray, capsule, eye drop, eye ointment, eye lotion, solid, or a moist sponge wipe, or is bonded to a solid surface.

14. A method for treating or preventing acne in a mammalian subject in need or at risk thereof, the method comprising administering to the subject the composition of claim 1.

15. The method of claim 14, comprising the additional step of administering to the subject one or more topical or oral agents selected from an antibiotic agent, an anti-comedonal agent, an anti-P. acnes agent other than a bacteriophage, an anti-inflammatory agent, an anti-seborrheic agent, and a sunscreen agent.

16. The method of claim 15, wherein the one or more topical agents further include one or more of a keratolytic agent and a sebum penetration enhancer.

17. The method of claim 15, wherein:
the antibiotic agent is an antibiotic gel, an antibiotic cream, an antibiotic lotion or an oral antibiotic;
the anti-comedonal agent comprises one or more of a retinoid, azelaic acid and isotretinoin;
the anti-P. acnes agent comprises one or more of benzoyl peroxide, dapsone, azelaic acid, erythromycin, tetracycline and clindamycin, sodium sulfacetamide, adapalene, minocycline, trimethoprim, nadifloxacin, ofloxacin, doxycycline, ampicillin, cephalexin, gentamycin, and trimethoprimsulfamethoxazole;
the anti-inflammatory agent comprises one or more of tetracycline, erythromycin, clindamycin, nicotinamide, minocycline, trimethoprim and isotretinoin; and
the anti-seborrheic agent comprises one or more of spironolactone, Dianette™ (cyproterone acetate and ethinylestradiol) and isotretinoin.

18. The method of claim 16, wherein the keratolytic agent comprises one or more of glycolic acid, lactic acid, mandelic acid, hydroxycapric acid, phytic acid, malic acid, citric acid, tartaric acid, salicylic acid, urea, and sulfur.

19. The method of claim 16, wherein the sebum penetration enhancer comprises one or more of a polysorbate surfactant, a non-ionic surfactant, an unsaturated fatty acid, an unsaturated alcohol, an aliphatic alcohol, a transcutol, a phospholipid, an unsaturated triglyceride, propylene glycol, and dipropylene glycol.

20. The method of claim 14, wherein the composition is administered every 12, 24, 48 or 72 hours at a dose of 10⁵ to 10¹³ plaque forming units (PFU).

21-25. (canceled)

26. The method of claim 14, wherein the acne is selected from acne vulgaris, acne conglobata, acne fulminans, Hidradenitis suppurativa, scalp acne, acne associated with Progressive Macular Hypomelanosis, acne associated with synovitis, acne, pustulosis, hyperostosis, and osteitis (SAPHO) syndrome and acne associated with Fatal Bacterial Granuloma after Trauma.
